United States Patent Application Publication US 2026/0097106 A1 - sequence listing, part 4

SEQ ID NO: 14 - DNA, 5186416 bp, Escherichia coli (residues 1-1,728,806 of 5,186,416)
  source 1..5186416: mol_type = genomic DNA
agcttttcattctgactgcaacgggcaatatgtctctgtgtggattaaaaaaagagtgtctgatagcagcttctgaactggttacctgccgtgagtaaattaaaattttattgacttaggtcactaaatactttaaccaatataggcatagcgcacagacagataaaaattacagagtacacaacatccatgaaacgcattagcaccaccattaccaccaccatcaccattaccacaggtaacggtgcgggctgacgcgtacaggaaacacagaaaaaagcccgcacctgacagtgcgggcttttttttcgaccaaaggtaacgaggtaacaaccatgcgagtgttgaagttcggcggtacatcagtggcaaatgcagaacgttttctgcgggttgccgatattctggaaagcaatgccaggcaggggcaggtggccaccgtcctctctgcccccgccaaaatcaccaaccacctggtggcgatgattgaaaaaaccattagcggccaggatgctttacccaatatcagcgatgctgaacgtatttttgccgaacttctgacgggactcgccgccgcccagccgggattcccgctggcgcaattgaaaactttcgtcgaccaggaatttgctcaaataaaacatgtcctgcatggcattagtttgttagggcagtgcccggatagcatcaacgctgcgctgatttgccgtggcgagaaaatgtcgatcgccattatggccggcgtgttagaagcgcgtggtcacaacgttaccgttatcgatccggtcgaaaaactactggcagtggggcattacctcgaatctaccgtcgatattgctgagtccacccgccgtattgcggcaagtcgtattccggctgatcacatggtgctgatggcaggtttcaccgccggtaatgaaaaaggcgaactggtggtgcttggacgtaacggttccgactactccgctgcggtgctggctgcctgtttacgcgccgattgttgcgagatttggacggacgttgacggggtttatacctgcgacccgcgtcaggtgcccgatgcgaggttgttgaagtcgatgtcctaccaggaagcgatggagctttcctacttcggcgctaaagttcttcacccccgcaccattacccccatcgcccagttccagatcccttgcctgattaaaaataccggaaatcctcaagcaccaggtacgctcattggtgccagccgtgatgaagacgaattaccggtcaagggcatttccaatctgaataacatggcaatgttcagcgtttccggcccggggatgaaaggaatggtcggcatggcggcgcgcgtctttgctgcaatgtcacgcgcccgtatttccgtggtgctgattacgcaatcatcttccgaatacagtatcagtttctgcgttccgcaaagcgactgtgtgcgagctgaacgggcaatgcaggaagagttctacctggaactgaaagaaggcttactggagccgctggcggtgacggaacggctggccattatctcggtggtaggtgatggtatgcgcaccttgcgtgggatctcggcgaaattctttgccgcgctggcccgcgccaatatcaacattgtcgccattgctcagggatcttctgaacgctcaatctctgtcgtggtaaataacgatgatgcgaccactggcgtgcgcgttactcatcagatgctgttcaataccgatcaggttatcgaagtgtttgtgattggcgtcggtggcgttggcggtgcgctgctggagcaactgaagcgtcaacaaagctggctgaagaataaacatatcgacttacgtgtctgcggcgttgccaactcgaaggctctgcttaccaatgtgcatggcctaaacctggaaaactggcaggaagaactggcgcaagccaaagagccgtttaatctcgggcgcttaattcgcctcgtgaaagaatatcatctgctaaacccggtcattgttgactgcacctccagccaggcagtggcggatcaatatgccgacttcttgcgcgaaggtttccacgttgtcacgccgaacaaaaaggccaacacctcgtcgatggattactaccatctgttgcgtcatgcggcggaaaaatcgcggcgtaaattcctctatgacaccaacgttggggctggattaccggttattgagaacctgcaaaatctgctcaatgctggtgatgaattgatgaagttctccggcattctttcaggttcgctttcttatatcttcggcaagttagacgaaggcatgagtttctccgaggcgactactctggcgcgggaaatgggttataccgaaccggatccgcgagatgatctttctggtatggatgtagcgcgtaagctattgattctcgctcgtgaaacgggacgtgaactggagctggtggatattgaaattgaacctgtgctgcccgcagagtttaacgctgagggtgatgttgccgcttttatggcgaatctgtcacagctcgacgatctctttgccgcgcgcgtggcgaaggcccgtgatgaaggaaaagttttgcgctatgttggcaatattgatgaagatggtgcctgccgcgtgaagattgccgaagtggatggtaatgatccgctgttcaaagtgaaaaatggcgaaaacgccctggccttttatagccactattatcagccgctgccgttggtcctgcgcggatacggtgcgggtaatgacgttacagctgccggtgtctttgccgatctgctacgcaccctctcatggaagttaggagtctaaaatggttaaggtttatgccccggcttccagtgccaatatgagcgtcgggtttgatgtgctcggggcggcggtgacacccgttgatggtgcattgctcggagatgtagtcacggttgaggcggcagagacattcagtctcaacaacctcggacgctttgccgataagctgccgtcagaaccacgggaaaatatcgtttatcagtgctgggagcgtttttgccaggagctgggcaagcaaattccagtggcgatgactctggaaaagaatatgccgatcggctcgggcttaggctccagcgcctgttcggtggtcgcggcgctgatggcgatgaatgaacactgcggcaagccacttaatgacacccgtttgctggctttgatgggcgagctggaagggcgtatctccggcagcattcattacgacaacgtggcgccgtgttttcttggtggtatgcagttgatgatcgaagaaaacgacatcatcagccagcaagtgccagggtttgatgagtggctgtgggtgctggcgtatccggggattaaagtctcgacggcagaagccagggctattttaccggcgcagtatcgccgccaggattgcattgcgcacgggcgacatctggctggcttcattcacgcctgctattcccgtcagcctgagcttgccgcgaagctgatgaaagatgttatcgctgaaccctaccgtgaacggttactgcctggcttccggcaggcgcggcaggcggttgcggaaatcggcgcggtagcgagcggtatctccggctccggcccgaccttgttcgctctgtgtgacaagccggataccgcccagcgcgttgccgactggttgggtaagaactacctgcaaaatcaggaaggttttgttcatatttgccggctggatacggcgggcgcacgagtactggaaaactaaatgaaactctacaatctgaaagatcacaatgagcaggtcagctttgcgcaagccgtaacccaggggttgggcaaaaatcaggggctgttttttccgcacgacctgccggaattcagcctgactgaaattgatgagatgctgaagctggattttgtcacccgcagtgcgaagatcctctcggcgtttattggtgatgaaatcccgcaggaaatcctggaagagcgcgtgcgcgcggcgtttgccttcccggctccggtcgccaatgttgaaagcgatgtcggttgtctggaattgttccacgggccaacgctggcatttaaagatttcggcggtcgctttatggcacaaatgctgacccatattgcgggcgataagccagtgaccattctgaccgcgacctccggtgataccggagcggcagtggctcatgctttctacggtttaccgaatgtgaaagtggttatcctctatccacgaggcaaaatcagtccactgcaagaaaaactgttctgtacattgggcggcaatatcgaaactgttgccatcgacggcgatttcgatgcctgtcaggcgctggtgaagcaggcgtttgatgatgaagagctgaaagtggcgctggggttaaactcagctaactcgattaacatcagccgtttgctggcgcagatttgctactactttgaagcagttgcgcagctgccgcaggaagcgcgcaaccagctggttgtctcggtgccaagcggaaacttcggcgatttgacggcgggtctgctggcgaagtcactcggtctgccggtgaaacgttttattgctgcgaccaacgtgaacgataccgtgccacgtttcctgcacgacggtcagtggtcacccaaagcgactcaggcgacgttatccaacgcgatggacgtgagtcagccgaacaactggccgcgtgtggaagagttgttccgccgcaaaatctggcaactgaaagagctgggttatgcagccgtggatgatgaaaccacgcaacagacaatgcgtgagttaaaagaactgggctacacctcggagccgcacgctgccgtagcgtatcgtgcgctgcgtgaccagttgaatccaggcgaatatggcttgttcctcggcaccgcgcatccggcgaaatttaaagagagcgtggaagcgattctcggtgaaacgttggatctgccaaaagagctggcagaacgtgctgatttacccttgctttcacataatctgcccgccgattttgctgcgttgcgtaaattgatgatgaatcatcagtaaaatctattcattatctcaatcaggccgggtttgcttttatgcagcccggcttttttgtgaagaaaatatggagagaaacgacagggaaaaaggagaaattctcaataaatgcggtaacttagagattaggattgcggagaataacaaccgccgttctcatcgcgtaatctccggatatcgacccataacgggcaatgataaaaggagtaacctgtgaaaaagatgcaatctatcgtactcgcactttccctggttctggtcgctcccatggcagcacaggctgcggaaattacgttagtcccgtcagtaaaattacagataggcgatcgtgataatcgtggctattactgggatggaggtcactggcgcgaccacggctggtggaaacaacattatgaatggcgaggcaatcgctggcacccacacggaccgccgccaccgccgcgccaccataagaaagctcctcatgatcatcacggcggtcatggtccaggcaaacatcaccgctaaatgacaaatgccgggtaacaatccggcattcagcgcctgatgcgacgctggcgcgtcttatcaggcctacgtgaattctgcaatatattgaatctgcatgcttttgtaggccggataaggcgttcacgccgcatccggcattgactgcaaacttaacgctgctcgtagcgtttaaacaccagttcgccattgctggaggaagcttcatcaaagaagtaaccttcgctattaaaaccagtcagttgctctggtttggtcagccgattttcaataataaaacgactcatcagaccgcgtgctttcttagcgtagaagctgattatcttaaatttgccgttcttctcatcgaggaacaccggcttgataatctcggcattcaatttcttcggcttcaccgatttaaaatactcatctgacgccagattaatcaccacattatcgccttgtgctgcgagcgcctcgttcagcttgttggtgatgatatctccccagaattgatacagatctttccctcgggcattctcaagacggatccccatttccagacgataaggctgcattaaatcgagcgggcgcagtacgccatacaagccggaaagcattcgcaaatgctgttgggcaaaatcgaaatcgtcttcgctgaaggtttcggcctgcaagccggtgtagacatcacctttaaacgccagaatcgcctggcgggcattctccggcgtgaaatctggctgccagtcatgaaagcgagcggcgttgatacccgccagtttgtcgctgatgcgcatcagcgtgctaatctgcggaggcgtcagtttccgcgcttcatggatcaactgctgggaattgtctaacagctccggcagcgtatagcgcgtggtggtcaacgggctttggtaatcaagcgttttcgcaggtgaaataagaatcagcatatccagtccttgtaggaaatttatgccgactttagcaaaaaaagagaatgagttgatcgatagttgtgattactcctgcgaaacatcatcccacgcgtccggagaaagctggcggccgatatccggataacgcaacggatcaaacaccgggcgcacgccgagtttacgctggcgtagataatcactggcaatggtatgaaccacaggcgagagcagtaaaatggcggtcaaattggtaatagccatgcaggccattatgatatctgccagttgccacatcagcggaagacttagcaaggtgccgccgatgaccgttgcgaaggtgcagatccgcaaacaccagatcgctttagggttgttcaggcgtaaaaagaagagattgttttcggcgtaaatgtagttggcaacgatggagctgaaggcaaacagaataaccacgagggtaacaaactcagcaccccaggaacccattagcacccgcatcgccttctggataagctgaataccttccagcggcatgtaggttgtgccgttacccgccagtaatatcagcatggcgcttgccgtacagatgaccagggtgtcgataaaaatgccaatcatctggacaatcccttgcgctgccggatgcggaggccaggacgccgctgccgctgccgcgtttggcgtcgaccccattcccgcctcattggaaaacatactgcgctgaaaaccgttagtaatcgcctggcttaaggtatatcccgccgcgccgcctgccgcttcctgccagccaaaagcactctcaaaaatagaccaaatgacgtggggaagttgcccgatattcattacgcaaatcaccaggctggtcagtacccagattatcgccatcaacgggacaaacccctgcatgagccgggcgacgccatgaagaccgcgagtgatcgccagcagagcaaagacagcgagaataatacctgtcaccagcgggggaaaatcaaaagaaaaactcagggctcgcgcaacggcgttcgcctgaattccgctgaaaattatgccgtaggcgatgagcaaaaagacggcgaacagaatgcccatccagcgcatccccagcccgcgcgccatataccatgccggtccgccacgaaactgcccattggcatcacgttctttataaagctgtgcgagggaacattcggcaaacgaggtcgccatgccgataaacgcggcaacccacatccagaagacggctccaggtccaccggcggtaattgccagcgcaacgccggccaggttgccgctacccacgcgcgccgcaagactggtacacaatgactgaaatgaggttaaaccgcctggctgtggatgaatgctatttttaagacttttgccaaactggcggatgtagcgaaactgcacaaatccggtgcgaaaagtgaaccaacaacctgcgccgaagagcaggtaaatcattaccgatccccaaaggacgctgttaataaaggagaaaaaatctggcatgcatatccctcttattgccggtcgcgatgactttcctgtgtaaacgttaccaattgtttaagaagtatatacgctacgaggtacttgataacttctgcgtagcatacatgaggttttgtataaaaatggcgggcgatatcaacgcagtgtcagaaatccgaaacagtctcgcctggcgataaccgtcttgtcggcggttgcgctgacgttgcgtcgtgatatcatcagggcagaccggttacatccccctaacaagctgtttaaagagaaatactatcatgacggacaaattgacctcccttcgtcagtacaccaccgtagtggccgacactggggacatcgcggcaatgaagctgtatcaaccgcaggatgccacaaccaacccttctctcattcttaacgcagcgcagattccggaataccgtaagttgattgatgatgctgtcgcctgggcgaaacagcagagcaacgatcgcgcgcagcagatcgtggacgcgaccgacaaactggcagtaaatattggtctggaaatcctgaaactggttccgggccgtatctcaactgaagttgatgcgcgtctttcctatgacaccgaagcgtcaattgcgaaagcaaaacgcctgatcaaactctacaacgatgctggtattagcaacgatcgtattctgatcaaactggcttctacctggcagggtattcgtgctgcagaacagctggaaaaagaaggtatcaactgtaacctgaccctgctgttctccttcgctcaggctcgtgcttgtgcggaagcgggcgtgttcctgatctcgccgtttgttggccgtattcttgactggtacaaagcgaataccgataagaaagagtacgctccggcagaagatccgggtgtggtttctgtatctgaaatctaccagtactacaaagagcacggttatgaaaccgtggttatgggcgcaagcttccgtaacatcggcgaaattctggaactggcaggctgcgaccgtctgaccatcgcaccggcactgctgaaagagctggctgagagcgaaggggctatcgaacgtaaactgtcttacaccggcgaagtgaaagcgcgtccggcgcgtatcactgagtccgagttcctgtggcagcacaaccaggatccaatggcagtagataaactggcggaaggtatccgtaagtttgctattgaccaggaaaaactggaaaaaatgatcggcgatctgctgtaatcattcttagcgtgaccgggaagtcggtcacgctacctcttctgaagcctgtctgtcactcccttcgcagtgtatcattctgtttaacgagactgtttaaacggaaaaatcttgatgaatactttacgtattggcttagtttccatctctgatcgcgcatccagcggcgtttatcaggataaaggcatccctgcgctggaagaatggctgacatcggcgctaaccacgccgtttgaactggaaacccgcttaatccccgatgagcaggcgatcatcgagcaaacgttgtgtgagctagtggatgaaatgagttgccatctggtgctcaccacgggcggaactggcccggcgcgtcgtgacgtaacgcccgatgcgacgctggcagtagcggaccgcgagatgcctggctttggtgaacagatgcgccagataagcctgcattttgtaccaactgcgatcctttcgcgtcaggttggtgtgattcgcaaacaggcgctgatccttaacttacccggtcagccgaagtctattaaagagacgctggaaggtgtgaaggacgctgcgggtaacgttgtggtacacggtatttttgccagcgtaccgtactgcattcagttgctggaagggccatacgttgaaacggcaccagaagtggttgctgcattcagaccgaagagtgcaagacgcgacgttagcgaataaaaaaatccccccgagcggggggatctcaaaacaattagtgggattcaccaatcggcagaacggtgcgaccaaactgctcgttcagtacttcacccatcgccagatagattgcactggcaccacagatcagaccaatccagccggcaaagtggatgattgcggcgttaccggcaatgttaccgatcgccagcagggcaaacagcacagtcaggctaaagaaaacgaattgcagaacgcgtgcgcctttcagcgtgccgaagaacataaacagcgtaaatacgccccacagacccaggtagacaccaaggaactgtgcatttggcgcatcggtcagacccagtttcggcatcagcagaatcgcaaccaacgtcagccagaaagaaccgtaagaggtgaatgcggttaaaccgaaagtgttgccttttttgtactccagcagaccggcaaaaatttgcgcgatgccgccgtagaaaatgcccatggcaagaataataccgtccagagcgaaataacccacgttgtgcaggttaagcagaatggtggtcatgccgaagcccatcaggcccagcggtgccggattagccaacttagtgttgcccataattcctcaaaaatcatcatcgaatgaatggtgaaataatttccctgaataacagtagtgttttcagggcgcggcataataatcagccagtggggcagtgtctacgatcttttgaggggaaaatgaaaattttccccggtttacggtgtcagacctgagtggcgctaaccatccggcgcaggcaggcgatttgcagtacggctggaattgtcacgcgataggcactgccgctgaccgctttaaccccatttaatgctgcgcccacagggcctcccagacccgcgccgcgcagcaaaccatgcccaagcacgctcattgctgcgtgggtgcgtaaaatgcgggtcaattggctggaaagcaaatgcgacacgccttttgccaataatttgtctttcatcagcagcggcagcagctcttccagctcattcaccctggcatcgaccgcgtgcagaaactcctgcttatgttcctcgtccatattcttccaggtgttacgcagaaattgttccagtaactgttgctcaatctcaaacgtagacatctctttgtcggctttcagcttcaatcgttttgaaacatcgagcaaaatggcccgatacaatttaccgtgtccgcgcagtttgttggcgatactatcgccaccaaaatgctgtaattctccagcaatcagctgccagttgcggcgatgttgctcgggatgcccttccatcgatttaaacagttcgttgcgcatcagtacgctggagaggcgagttttgcctttttcattatgggtgagcaatcgggcgaaatttgccaactgttcctcactacaatgctgaagaaaatccagatctgaatcattcaggtaattaacattcattttttgtggtttctatattctggcgttagtcgtcgccgataattttcagcgtggccatatccgatgagttcaccgtatgaccggaaaaggtgatttttgagacgcagcgtttattgtcgttatcactgttaatgttgatccagtcagtggtttgcccttcttttatttctgaaggaatattcagactctgactggcgctacgggcggctttgaaataaaccgatgcaccgcttaactgtaaatcgccatggtcggcagagagttgtatgcgtttcacaatgcgacaaacaggaagtttcagcgccagatcgttggtttcgttacgcggcattgcaatgacgccgaggagtttatggtcgtttgcctgcgccgtgcagcacagcatcagactaatcgccaggctggcggaaatcgtaaaaacggatttcataaggattctcttagtgggaagaggtagagggatgaatacccactagtttactgctgataaagagaaggttcaggtacgtaatcttttctttttattacaattttttgatgaatgccttggctgcgattcattctttatctgaataaaattgctgtcaattttacgtcttgtcctgccatatcgcgaaatttctgcgcaaaagcacaaaaaatttttgcatctcccccttgatgacgtgggttacgaccccatttagtagtcaaccgcagtgagtgagtctgcaaaaaaatgaaattgggcagttgaaaccagacgtttcgcccctattacagactcacaaccacatgatgaccgaatatatagtggagacgtttagatgggtaaaataattggtatcgacctgggtactaccaactcttgtgtagcgattatggatggcaccactcctcgtgtgctggagaacgccgaaggcgatcgcaccacgccttctatcattgcctatacccaggatggtgaaactctggttggtcagccggctaaacgtcaggcagtgacgaacccgcaaaacaccctgtttgcgattaaacgcctgattggccgccgcttccaggacgaagaagtacagcgtgatgtttccatcatgccgttcaaaattattgctgctgataacggcgacgcatgggtcgaagttaaaggccagaaaatggcaccgccgcagatctctgctgaagtgctgaaaaaaatgaagaaaaccgctgaagattacctgggtgaaccggtaactgaagctgttatcaccgtaccggcatactttaacgatgctcagcgtcaggcaaccaaagacgcaggccgtatcgctggtctggaagtaaaacgtatcatcaacgaaccgaccgcagctgcgctggcttacggtctggacaaaggtactggcaaccgtactatcgcggtttatgacctgggtggtggtactttcgatatttctattatcgaaatcgacgaagttgacggcgaaaaaaccttcgaagttctggcaaccaacggtgatacccacctgggtggtgaagacttcgacagccgtctgatcaactacctggttgaagaattcaagaaagatcagggcattgacctgcgcaacgatccgctggcaatgcagcgcctgaaagaagcggcagaaaaagcgaaaatcgaactgtcttccgctcagcagaccgacgttaacctgccgtacatcactgcagatgcgaccggtccgaaacacatgaacatcaaagtgactcgtgcgaaactggaaagcctggttgaagatctggtaaaccgttccattgagccgctgaaagttgcactgcaggacgctggcctgtccgtatctgatatcgacgacgttatcctcgttggtggtcagactcgtatgccaatggttcagaagaaagttgctgagttctttggtaaagagccgcgtaaagacgttaacccggacgaagctgtagcaatcggtgctgctgttcagggtggtgttctgactggtgacgtgaaagacgtactgctgctggacgttaccccgctgtctctgggtatcgaaaccatgggcggtgtgatgacgacgctgatcgcgaaaaacaccactatcccgaccaagcacagccaggtgttctctaccgctgaagacaaccagtctgcggtaaccatccatgtgctgcagggtgaacgtaaacgtgcggctgataacaaatctctgggtcagttcaacctggatggtatcaacccggcaccgcgcggcatgccgcagatcgaagttaccttcgatatcgatgctgacggtatcctgcacgtttccgcgaaagataaaaacagcggtaaagagcagaagatcaccatcaaggcttcttctggtctgaacgaagatgaaatccagaaaatggtacgcgacgcagaagctaacgccgaagctgaccgtaagtttgaagagctggtacagactcgcaaccagggcgaccatctgctgcacagcacccgtaagcaggttgaagaagcaggcgacaaactgccggctgacgacaaaactgctatcgagtctgcactgactgcactggaaactgctctgaaaggtgaagacaaagccgctatcgaagcgaaaatgcaggaactggcacaggtttcccagaaactgatggaaatcgcccagcagcaacatgcccagcagcagactgccggtgctgatgcttctgcaaacaacgcgaaagatgacgatgttgtcgacgctgaatttgaagaagtcaaagacaaaaaataatcgccctataaacgggtaattatactgacacgggcgaaggggaatttcctctccgcccgtgcattcatctaggggcaatttaaaaaagatggctaagcaagattattacgagattttaggcgtttccaaaacagcggaagagcgtgaaatcaaaaaggcctacaaacgcctggccatgaaataccacccggaccgtaaccagggtgacaaagaggccgaggcgaaatttaaagagatcaaggaagcttatgaagttctgaccgactcgcaaaaacgtgcggcatacgatcagtatggtcatgctgcgtttgagcaaggtggtatgggcggcggcggttttggcggcggcgcagacttcagcgatatttttggtgacgttttcggcgatatttttggcggcggacgtggtcgtcaacgtgcggcgcgcggtgctgatttacgctataacatggagctcaccctcgaagaagctgtacgtggcgtgaccaaagagatccgcattccgactctggaagagtgtgacgtttgccacggtagcggtgcaaaaccaggtacacagccgcagacctgtccgacctgtcatggttctggtcaggtgcagatgcgtcagggattcttcgctgtacagcagacctgtccacactgtcagggccgcggtacgctgatcaaagatccgtgcaacaaatgtcatggtcatggtcgtgttgagcgcagcaaaacgctgtccgttaaaatcccggcaggagtggacactggagaccgcatccgtcttgcgggcgaaggtgaagcgggcgagcatggcgcaccggcaggcgatctgtacgttcaggttcaggttaaacagcacccgattttcgagcgtgaaggcaacaacctgtattgcgaagtcccgatcaacttcgctatggcggcgctgggtggcgaaatcgaagtaccgacccttgatggtcgcgtcaaactgaaagtgcctggcgaaacccagaccggtaagcttttccgtatgcgcggtaaaggcgtcaagtctgtccgcggtggcgcacagggtgatttgctgtgccgcgttgtcgtcgaaacaccggtaggcctgaacgagaagcagaaacagctgctgcaagagctgcaagaaagcttcggtggcccaaccggcgagcacaacagcccgcgctcaaagagcttctttgatggtgtgaagaagttttttgacgacctgacccgctaacctccccaaaagcctgcccgtgggcaggcctgggtaaaaccagggtgcgttgaagatatgcgagcacctgaaaagtggcggggatcactcccataagcgctaacttaagggttgtggtattacgcctgatatgatttaacgtgccgatgaattactctcacgataactggtcagcaattctggcccatattggtaagcccgaagaactggatacttcggcacgtaatgccggggctctaacccgccgccgcgaaattcgtgatgctgcaactctgctacgtctggggctggcttacggccccggggggatgtcattacgtgaagtcactgcatgggctcagctccatgacgttgcaacattatctgacgtggctctcctgaagcggctgcggaatgccgccgactggtttggcatacttgccgcacaaacacttgctgtacgcgccgcagttacgggttgtacaagcggaaagagattgcgtcttgtcgatggaacagcaatcagtgcgcccgggggcggcagcgctgaatggcgactacatatgggatatgatcctcatacctgtcagttcactgattttgagctaaccgacagcagagacgctgaacggctggaccgatttgcgcaaacggcagacgagatacgcattgctgaccggggattcggttcgcgtcccgaatgtatccgctcacttgcttttggagaagctgattatatcgtccgggttcactggcgaggattgcgctggttaactgcagaaggaatgcgctttgacatgatgggttttctgcgcgggctggattgcggtaagaacggtgaaaccactgtaatgataggcaattcaggtaataaaaaagccggagctccctttccggcacgtctcattgccgtatcacttcctcccgaaaaagcattaatcagtaaaacccgactgctcagcgagaatcgtcgaaaaggacgagtagttcaggcggaaacgctggaagcagcgggccatgtgctattgctaacatcattaccggaagatgaatattcagcagagcaagtggctgattgttaccgtctgcgatggcaaattgaactggcttttaagcggctcaaaagtttgctgcacctggatgctttgcgtgcaaaggaacctgaactcgcgaaagcgtggatatttgctaatctactcgccgcatttttaattgacgacataatccagccatcgctggatttcccccccagaagtgccggatccgaaaagaagaactaactcgttgtggagaataacaaaaatggtcatctggagcttacgggtggccattcatgggacagtatccctgacagcctacaaaacgcaattgaagaacgcgaggcatcgtcttaacgaggcaccgaggcgtcgcattcttcagatggttcaacccttaagttagcgcttatgggatcactccccgccgttgctcttactcggattcgtaagccgtgaaaacagcaacctccgtctggccagttcggatgtgaacctcacagaggtcttttctcgttaccagcgccgccactacggcggtgatacagatgacgatcagggcgacaatcatcgccttatgctgcttcattgctctcttctccttgaccttacggtcagtaagaggcactctacatgtgttctgcatatagggggcctcgggttgatagtaaaatatcactcggggcttttctctatctgccgttcagctaatgcctgagacagatagcctcaagcacccgccgctattatatcgctctctttaactcattctgttttatcgattctaatcctgaagacgcctcgcattttgatggcgtaattttttaatgatttaattatttaactttaatttatctcttcatcgcaattattgacgacaagctggattatttttgaaatattgacctaacaaacatcgccgactgacaacaaattaattattacttttcctaattaatccctcagaaatcctcaccttaagctatgattatcagggcttagggtcactcgtcagcgcttacagccgtcaaaaacgcatctcaccgctgatggcgcaaattcttcaatggctcgtaaaaaacgaattattcctacactataatctgattttaacgatgattcgtgcggggtaaaatagtaaaaacgatctattcacctgaaagagaaataaaaagtgaaacatctgcatcgattctttagcagtgatgcctcgggaggcattattcttatcattgccgctatcctggcgatgatgatggccaacagcggcgcaaccagtggatggtatcacgactttctggagacgccggttcagctccgggttggttcactcgaaatcaacaaaaacatgctgttatggataaatgacgcgctgatggcggtatttttcctgttagtcggtctggaagttaaacgtgaactgatgcaaggatcgctagccagcttacgccaggccgcatttccagttatcgccgctattggtgggatgattgtgccggcattactctatctggcttttaactatgccgatccgattacccgcgaagggtgggcgatcccggcggctactgacattgcctttgcacttggtgtgctggcgctattgggaagtcgtgttccgttagcgctgaagatctttttgatggctctggctattatcgacgatcttggggccatcattatcatcgcattgttctacactaatgacttatcgatggcctctcttggcgtcgcggctgtagcaattgcggtactcgcggtattgaatctgtgtggtgtacgccgcacgggcgtctatattctggttggcgtagtgttgtggactgcggtgttgaaatcgggggttcacgcaactctggcgggggtaattgtcggcttctttattcctttgaaagagaagcatgggcgttctccagcgaagcgactggagcatgtgttgcacccgtgggtggcgtatctgattttgccgctgtttgcattcgctaatgctggcgtttctctgcaaggcgtcacgctggatggcttgacctccattctgccattggggatcatcgctggcttgctgattggcaaaccgctggggattagtctgttctgctggttggcgctgcgtttgaaactggcgcatctgcctgagggaacgacttatcagcaaattatggcggtggggatcctgtgcggtatcggttttactatgtctatctttattgccagcctggcctttggtagcgtagatccagaactgattaactgggcgaaactcggtatcctggtcggttctatctcttcggcggtaattggatacagttggttacgcgttcgtttgcgtccatcagtttgacaggacggtttaccggggagccataaacggctcccttttcattgttatcagggagagaaatgagcatgtctcatatcaattacaaccacttgtattacttctggcatgtctataaagaaggttccgtggttggcgcagcggaggcgctttatttaacaccacaaaccattaccggacagattcgggctctggaagagcgcctgcaaggcaaattatttaagcgcaagggacgtggtctcgaacccagcgagctgggagagctggtctatcgctatgccgataaaatgttcaccttaagccaggaaatgctggatatcgtgaactatcgcaaagaatccaatttattgtttgacgttggcgtggctgatgcactttccaaacgtctggtcagtagcgtgctgaatgctgcagtagtagaaggcgagccgattcatcttcgctgcttcgaatccacccacgaaatgctgctggagcaattaagtcagcataaactggatatgatcatttccgactgtccgatagactctacgcagcaggaaggcctgttctccgtgagaattggcgaatgtggcgtgagtttctggtgtacaaatccaccaccagaaaaaccgttcccggcttgtctggaagaacggcgacttttgattcctgggcgacgttcaatgttagggcgcaaattgcttaactggtttaactcccagggattaaacgtagaaatcctcggcgagtttgatgatgccgcgttgatgaaagcttttggtgcaatgcacaatgcaatcttcgttgccccaacgctttatgcatatgacttttatgccgataaaactgtcgtagaaattggtcgcgtcgagaatgtgatggaagagtaccatgctatttttgctgagcggatgattcagcacccggcggtacagcgaatctgcaatacggattattctgcgctttttagtccagcggcgcgttaatcggcagctcccccaaagttaaagtggaggagatagattagttgtacataaccacgattttgactcggctcattatttgcccgcttgagacattatttccatatgtacgcgggcgaataaatagaggaatctgattacttccttcatggggatgctgaaaagagtagtaattgcttttaccatactggatttcattcgtaccatcattcgagagttgaaagcctacttgacccgcaccgtcctcactgttttctaactcattttttaatatgctggttcctgactcctgtatcgtcactggttcaaagtaatattcaacatcactgggttcaaaaactaattcaccttgctcgccctggatgcagtcaaatcttatatgatgaaactgataattttcattattgatacgagacagtacaaatcgtccagtgtcgatggattgatcttcaaaaccacaggtcattaaatttacctgtaaaatagtatttaaattataattaaagcggacgctattacaattagtattattccctgtacatgaactcacttcaatttcgaacaacaaaggaaaaggagttcctggaaaaatgtctgcggtgttagaactatctgatacagatgcgatagaatatggaatggtgaaatttatcgcagatagcatttcttctaaattataagatgacttccctggaagctctatttttttaccgtcatattcaaaggggaaattaataatataatgacgacttccgactttaaaccttaaagcgttctgtgttaaaaaatgaactttaatggcgttggttgtctcttgcaagtctgtacactcaatgatatttccggtgttttcaattttttcggcggtgagattacctttcatactcagtggcttgagtatatatgttccacgttgttcaccgacattggtcaatgcacagggagcactttgcacaataaaagaatatagactcaaggtgattaataaaagccacttcatagtaaactccttttactggcatatatatgttttgttttcatcgataacgtgttgaaaagtaatagtacagaataaattctgttcatcattgagagcaacttttatgccagttggaatttcatctacgcgaataaaaaggcgactaccctgaccaacgactccaatattgttttcctggagatccagtacgtcatagccaaaggttaatggcgaaccatcgggacgcagtgcctgtatataccaaggcttacgttggtcagttgtaaactgcacataagaaactgctccacggtaaggcgcaataatttgacgattgccctgcaattctgtttcactttcactgtttgctatatcaagtaccagatggttttcacgatgaggtataatcgggtcgtaaacaacctggcctttgctgtttgttcggttgtatttttgtccattaatatgcgcgccttctaatccaggcgcatccagaattgcaaatgtatcggataactggttagtgatattaataccaccggaccagacaactaatccactactaatacttccaccactttgccaggcgtttttagaatgactatagctgccatctattatggcgatgggagttctccagcttaaattcgtaccaagcgaggtatcattattttgttgttgctgattaacatatataccataatttaactgatcatgttcaccggctatgccagtaattctagtattgttggaggaatagccatctttggaaaatgaggtcgaattcgataagttaatttggtgaagtgttttggcaatatcatccccccagtagaaaggaatggagataaacagattaaaacgctcctcttctttattattttcatcataagattggctggcagagaaagtataactaatgtgttgccagttattggagtaactgaattggtaatctttagcatttccacttcgcccccagtaattccgccaaagcgcacttaatgatacatttcccagattattggataaaggttgcataatattggcagaaaggctattttttctgccaatatcataaaaatcattataatcactctgatgatagtgtttatcattttcgtaaagatggtcgctgaatgtcctgtaatcctgcgaagcataacgccaggcggccacgctaaatcgagtggctgtttgtactagatatttattataggcgacctgatagctcgtaccttcgtgtctggtatcattatttaacttactactcgatcgggcagcgtaaaaagagatggcacccagcggtgtattccaaccatttcccagagttatagcattatagttatcggataaaatcgtacccgattatgtgatcaggttgttattatttagattaatgtttaaattttttaatttcttgatgtgaagttgatgaaagtttaatattcttaattattccattctttataagaagagcaaggtgccattattagagtgagagagtaggatgtttcagagtatgcttcagattattttttattcctctgtagtgaattaataatcatcacagttaatttcattctgaaattacttcttttttgagattttttaattttgatgagctatgtttttcataaggaacatagactcgttgatgctctgaaggtattttctcatttccggggatgttttgtcgtaatcgtgcataaactttttcagttctttatacacatcattatttagctttacattgtcgcgaactaaagtttgtaccaatggtatcaaaatttcgaaacgggacggtttgtcatcaatacttgccagggttttgaatactcctgtgtatctgtaacctaagtgcttattgacaagttgagtggtccatcgaccaggcataatatcttcacagagcaaattttttattctggtattagtgaatgatgctccaaatatgttgctttttttaatgaagagattattaatttctccatttgaaaagatggtgtttgataagtcgctttcaaaacatgatatattggataatacacaactaaaataatacccatatgaaaggttgctcttttctattgttatatttgatagcgacattttatgtatattgatattaggggcagtcaaatactggatcttttgatcgttaagttcatacatctccagtgatttattatagggtaataaaagtataaattcctttatattatctccgcagtaagaaaagacgacatcaaatttattagtggccatattttcagttaagcagtaagctgatttttctattaaccgactgggcacgcttttaaataaagataattttccacatagttttgaatatgccgaattgctagttttaaaattctgccatgttattttctggttatcatctttcgatgaggaggggattttattgcattgttcattatatagctcagggaaaatatttttttaattagctttttgatttcctggttaagatgactttttttcttgtctattgcactatatttagcgttttgtgacgtctcctgatgagcataaaatgactggagatttctgcaggcctcataaaatatttcaggagtatatagctgtgggtatatttccgggttgaagtttgcctttaagaacttaacgaatttttcatagcattcttgatatatcttaatctcttcagaaagacattcgcttgttctgtcatcaaaaacatccaatctaagtaatgtgatgcctttgtgtttaaaaaataaaattgaactgtatgttctatgagtttacatctataaaaatgtgcatctctcagatgagtatattgaaaaaaatgatggaggactggagatggtttaggaaaatcctggcttctgaaaaagtcatcaaacaaaattaagaactctgttttatactcgcaaaacacttttactaactcattttgtcttgttttatttattattacatcatctactatatttgatttataaagacaatgtggcgaagttgagataccatctgtcattatcagtccttgaagttgatgaatttttattaatttaatttatgagtgaatgtgactactatcaaaaatcgctcattaattttaagaagtacaatataaataggtatttaacctgtgttgattgctgttaataatttacaaggtctaatgaggagatatttatgaatggttaaagtatataggaatttaattcaaaaatagagtggtcttaagtttaatacctcaatgtgtatcacaatatccacattctttgtagggggtctggagattgagtagatattcttgttcagaatgtatcagccgatggttctacgattcttaagccacgaagagttcagatagtacaacggcatgtctgcaagaacctgcaacttttgactatctggcaaccggcagtgtgttctctcacgcatcacaaaagcagcaggcataaaaaaacccgcttgcgcgggctttttcacaaagcttcagcaaattggcgattaagccagtttgttgatctgtgcagtcaggttagccttatgacgtgcagctttgtttttgtggatcagacctttagcagcctgacggtccacgatcggttgcatttcgttaaatgctttctgtgcagcagctttgtcgccagcttcgatagctgcgtatactttcttgatgaaagtacgcatcatagagcgacggcttgcgttgtgcttacgagccttttcagactgaatggcgcgcttcttagctgatttgatattagccaaggtccaactcccaaatgtgttctatatggacaattcaaaggccgaggaatatgcccttttagccttcttttgtcaatggatttgtgcaaataagcgccgttaatgtgccggcactcgttacgtagtgatggcgcaggattctaccagcttgcggggtgtgaatacagcttttccgcgataaaaattgcagcaggcggtcagtttcttcccgtgatttgcgccatggcaatgaaaagccacttctttctgatttcggtactcaatcgccggttaaccttgaccgctgtacaaggtatactcggacgattttcactgttttgagccagacatgaagctgatacgcggcatacataatctcagccaggccccgcaagaagggtgtgtgctgactattggtaatttcgacggcgtgcatcgcggtcatcgcgcgctgttacagggcttgcaggaagaagggcgcaagcgcaacttaccggtgatggtgatgctttttgaacctcaaccactggaactgtttgctaccgataaagccccggcacggctgacccggctgcgggaaaaactgcgttaccttgcagagtgtggcgttgattacgtgctgtgcgtgcgtttcgacaggcgtttcgcggcgttaaccgcgcaaaatttcatcagcgatcttctggtgaagcatttgcgcgtaaaatttcttgccgtaggggatgatttccgctttggcgctggtcgtgaaggcgatttcttgttattacagaaagctggcatggaatacggcttcgatatcactagtacgcaaactttttgcgaaggtggcgtgcgtattagcagcaccgctgtgcgtcaggcgctggcggatgacaatctggctctggcagaaagtttactggggcacccgtttgccatctccgggcgtgtagtccacggtgatgaattagggcgcactataggtttcccgacggcgaatgtaccgctacgccgtcaggtttccccggtgaaaggggtttatgcggtagaagtgctgggcctcggtgaaaagccgttacccggcgtggcaaacatcggaacacgcccaacggttgccggtattcgccagcagctggaagtgcatttgttagatgttgcaatggacctttacggtcgccatatacaagtagtgctgcgtaaaaaaatacgcaatgagcagcgatttgcgtcgctggacgaactgaaagcgcagattgcgcgtgatgaattaaccgcccgcgaattttttgggctaacaaaaccggcttaagcctgttatgtaatcaaaccgaaacacggaaccgagaatctgatgagtgactataaatcaaccctgaatttgccggaaacagggttcccgatgcgtggcgatctcgccaagcgcgaaccgggaatgctggcgcgttggactgatgatgatctgtacggcatcatccgtgcggctaaaaaaggcaaaaaaaccttcattctgcatgatggccctccttatgcgaatggcagcattcatattggtcactcggttaacaagattttgaaagacattatcgtgaagtccaaagggctttccggttatgactcgccgtatgtgcctggctgggactgccacggtctgccgatcgagctgaaagtagagcaagaatacggtaagccgggtgagaaattcaccgccgccgagttccgcgccaagtgccgcgaatacgcggcgacccaggttgacggtcaacgcaaagactttatccgtctgggcgtgctgggcgactggtcgcacccgtacctgaccatggacttcaaaactgaagccaacatcatccgcgcgctgggcaaaatcatcggcaacggtcacctgcacaaaggcgcgaagccggtacactggtgcgttgactgccgttctgcgctggcggaagcggaagttgagtattacgacaaaacttctccgtccatcgacgttgcttttcaggcggtcgatcaggatgcactgaaagcaaaatttgccgtaagcaacgttaacggcccaatctcgctggtgatctggaccactacgccgtggactctgcctgcgaaccgcgcaatctctattgcacctgatttcgactatgcgctggtgcagatcgacggtcaggccgtgattctggcgaaagatctggttgaaagcgtaatgcagcgtatcggcgtgaccgattacaccattctcggcacggtaaaaggtgcggagcttgagttgctgcgctttacccatccgtttatgggcttcgacgttccggcaatcctcggcgatcacgttaccctggatgccggtaccggtgccgttcacaccgcgcctggccacggcccggacgactatgtgatcggtcagaaatacggcctggaaaccgctaacccggttggcccggacggcacttatctgccgggcacttatccgacgctggatggcgtgaacgtcttcaaagcgaacgacatcgtcgttgcgctgctgcaggaaaaaggcgcgctgctgcacgttgagaaaatgcagcacagctatccgtactgctggcgtcacaaaacgccgatcatcttccgcgcgacgccgcagtggttcgtcagcatggatcagaaaggtctgcgtgcgcagtcactgaaagagatcaaaggcgtgcagtggatcccggactggggccaggcgcgtatcgagtcgatggttgctaaccgtcctgactggtgtatctcccgtcagcgcacctggggcgtaccgatgtcactgttcgtgcacaaagacacggaagagctgcatccgcgtactctcgaactaatggaagaagtggcaaaacgcgttgaagttgacggcatccaggcgtggtgggatcttgatgcgaaagagatcctcggcgatgaagctgatcagtacgtgaaagtgccggacacattggatgtatggtttgactccggatctacccactcttctgttgttgacgtgcgtccggaatttgccggtcacgcagcggacatgtatctggaaggttctgaccagcaccgtggttggttcatgtcttccctaatgatctccaccgcgatgaaaggcaaagcgccgtatcgtcaggtactgacccacggctttaccgtggatggtcagggtcgcaagatgtctaaatccatcggcaataccgtttcgccgcaggatgtgatgaacaaactgggcgcggatattctgcgtctgtgggtggcatcaaccgactacaccggtgaaatggccgtttctgacgagatcctgaaacgtgctgccgatagctatcgtcgtatccgtaacaccgcgcgcttcctgctggcaaacctgaacggttttgatccagcaaaagatatggtgaaaccggaagagatggtggtactggatcgctgggccgtaggttgtgcgaaagcggcacaggaagacatcctcaacgcgtacgaagcatacgatttccacgaagtggtacagcgtctgatgcgcttctgctccgttgagatgggttccttctacctcgacatcatcaaagaccgtcagtacaccgccaaagcggacagtgtggcgcgtcgtagctgccagactgcgctgtatcacatcgcagaagcgctggtgcgctggatggcaccaatcctctccttcaccgctgatgaagtgtggggctacctgccgggcgaacgtgaaaaatacgtcttcaccggtgagtggtacgaaggcctgtttggcctggcagacagtgaagcgatgaacgatgcgttctgggacgagctgttgaaagtgcgtggcgaagtgaacaaagtcattgagcaagcgcgtgccgacaagaaagtgggtggctcgctggaagcggcagtaaccttgtatgcagaaccggaactggcggcgaaactgaccgcgctgggcgatgaattacgatttgtcctgttgacctccggcgctaccgttgcagactataacgacgcacctgctgatgctcagcagagcgaagtactcaaagggctgaaagtcgcgttgagtaaagccgaaggtgagaagtgcccacgctgctggcactacacccgggatgtcggcaaggtggcggaacacgcagaaatctgcggccgctgtgtcagcaacgtcgccggtgacggtgaaaaacgtaagtttgcctgatgagtcaatcgatctgttcaacagggctacgctggctgtggctggtggtagtcgtgctgattatcgatctgggcagcaaatacctgatcctccagaactttgctctgggggatacggtcccgctgttcccgtcgcttaatctgcattatgcgcgtaactatggcgcggcgtttagtttccttgccgatagcggcggctggcagcgttggttctttgccggtattgcgattggtattagcgtgatcctggcagtgatgatgtatcgctcgaaggccacgcagaagctaaacaatatcgcttatgcgctgattattggcggcgcgctgggcaacctgttcgaccgcctgtggcacggcttcgttgtcgatatgatcgacttctacgtcggcgactggcacttcgccaccttcaaccttgccgatactgccatttgtgtcggtgcggcactgattgtgctggaaggttttttgccttctaaagcgaaaaaacaataataaaccctgccggataaggcctacagattgctgcgaaatcgtaggccgcatccggcaaaaatcctcaaaatataagagcaaacctgcatgtctgaatctgtacagagcaatagcgccgtcctggtgcacttcacgctgaaactcgatgatggcaccaccgctgagtctacccgcaacaacggtaaaccggcgctgttccgcctgggcgatgcttctctttctgaagggctggagcaacacctgctggggctgaaagtgggcgataaaaccaccttctcgctggagcccgatgcggcgtttggcgtgccgtcaccggacctgattcagtacttctcccgccgtgaatttatggatgcaggcgagccagaaattggcgcaattatgctttttaccgcaatggatggcagtgagatgcctggcgtgatccgcgaaattaacggcgactccattaccgttgatttcaaccatccgctggccgggcagaccgttcattttgatattgaagtgctggaaatcgatccggcactggaggcgtaacatgcagatcctgttggccaacccgcgtggtttttgtgctggggtagaccgcgctatcagcattgttgaaaacgcgctggccatttacggcgcaccgatatatgtccgtcacgaagtggtgcataaccgctacgtggtcgatagcctgcgcgagcgtggggctatctttattgagcagattagcgaagtaccggacggcgcgatcctgattttctccgcacacggtgtttctcaggcggtacgtaacgaagcaaaaagccgcgatttgacggtgtttgatgccacctgtccgctggtgaccaaagtgcatatggaagtcgcccgcgccagccgtcgtggcgaagagtcgattctcatcggccacgccgggcacccggaagtggaaggtacgatgggccagtacagtaacccggaagggggaatgtatctggtcgaatcgccggacgatgtgtggaaactgacggtcaaaaacgaagagaaactctcctttatgacccaaaccacgctgtcggtggatgacacgtctgatgtgatcgacgcgctgcgtaaacgcttcccgaaaattgtcggtccgcgcaaagatgacatctgctacgccacgactaaccgacaggaagcggtacgcgccctggcagagcaggcggaagtggtgctggtggtcggttcgaaaaactcctccaactccaaccgtctggcggaactggcccagcgtatgggcaaacgcgcgtttttgattgatgatgcgaaagatatccaggaagagtgggtgaaagaggttaaatgcgtcggcgtgactgcgggcgcatcggctccggatattctggtgcaaaatgtggtggcacgtttgcagcagctgggcggtggtgaagccattccgctggaaggccgtgaagaaaacattgttttcgaagtgccgaaagagctgcgtgtcgatattcgtgaagtcgattaagtcattagcagcctaagttatgcgaaaatgccggtcttgttaccggcattttttatggagaaaacatgcgtttacctatcttcctcgatactgaccccggcattgacgatgccgtcgccattgccgccgcgatttttgcccccgaactcgacctgcaactgatgaccaccgtcgcgggtaatgtctcggttgagaaaactacccgtaatgccttgcaactgctgcatttctggaatgcggagattccgctcgcccagggagccgctgtgccgctggtacgcgcaccgcgtgatgcggcatctgtgcacggcaaatcgggaatggctggctacgactttgttgagcacaaccgaaagccgctcgaggtaccggcgtttctggcgattcgggatgccctgatgcgtgcaccagagcctgttaccctggtagccatcggcccgttaaccaatattgcgctgttactttcacaatgcccggaatgcaaaccgcatattcgccgtctggtgatcatgggtggttctgccggtcgcggcaactgcacaccaaacgccgagtttaatatcgctgccgatccagaagcggctgcctgtgtcttccgtagcggaatcgaaattgtcatgtgcggtctggatgtcaccaatcaggcaatattaacccctgactatctcgctactttgccggagttgaatcgcaccggaaaaatgctccacgccctgtttagccactaccgtagcggcagtatgcaaagcggtctgcgaatgcacgatctctgcgccatcgcctggctggtgcgcccggacttattcaccctcaagccgtgttttgtcgcggtagaaactcaaggcgaatttacctcaggcacgacggtggttgatatcgacggttgcttgggcaaaccagccaatgtacaggtggcattggatctgaatgtaaaaggcttccagcagtgggtagctgaggtgctggctctggtgccgtaacctgtcacatgttatcggcatgcagtcattcatcgactcatgcctttcactgatatccctccctgtttatcattaatttctaattatcagcgtttttggctggcggcgtagcgatgcgctggttactctgaaaacggtctatgcaaattaacaaaagagaatagctatgcatgatgcaaacatccgcgttgccatcgcgggagccggggggcgtatgggccgccagttgattcaggcggcgctggcattagagggcgtgcagttgggcgctgcgctggagcgtgaaggatcttctttactgggcagcgacgccggtgagctggccggagccgggaaaacaggcgttaccgtgcaaagcagcctcgatgcggtaaaagatgattttgatgtgtttatcgattttacccgtccggaaggtacgctgaaccatctcgctttttgtcgccagcatggcaaagggatggtgatcggcactacggggtttgacgaagccggtaaacaagcaattcgtgacgccgctgccgatattgcgattgtctttgctgccaattttagcgttggcgttaacgtcatgcttaagctgctggagaaagcagccaaagtgatgggtgactacaccgatatcgaaattattgaagcacatcatagacataaagttgatgcgccgtcaggcaccgcactggcaatgggagaggcgatcgcccacgcccttgataaagatctgaaagattgcgcggtctacagtcgtgaaggccacaccggtgaacgtgtgcctggcaccattggttttgccaccgtgcgtgcaggtgacatcgttggtgaacataccgcgatgtttgccgatattggcgagcgtctggagatcacccataaggcgtccagccgtatgacatttgctaacggcgcggtaagatcggctttgtggttgagtggtaaggaaagcggtctttttgatatgcgagatgtacttgatctcaataatttgtaaccacaaaatatttgttatggtgcaaaaataacacatttaatttattgattataaagggctttaatttttggcccttttatttttggtattatgtttttaaattgtctataagtgccaaaaattacatgttttgtcttctgtttttgttgttttaatgtaaattttgaccatttggtccacttttttctgctcgtttttatttcatgcaatcttcttgctgcgcaagcgttttccagaacaggttagatgatctttttgtcgcttaatgcctgtaaaacatgcatgagccacaaaataatataaaaaatcccgccattaagttgacttttagcgcccatatctccagaatgccgccgtttgccagaaattcgtcggtaagcagatttgcattgatttacgtcatcattgtgaattaatatgcaaataaagtgagtgaatattctctggagggtgttttgattaagtcagcgctattggttctggaagacggaacccagtttcacggtcgggccataggggcaacaggttcggcggttggggaagtcgttttcaatacttcaatgaccggttatcaagaaatcctcactgatccttcctattctcgtcaaatcgttactcttacttatccccatattggcaatgtcggcaccaatgacgccgatgaagaatcttctcaggtacatgcacaaggtctggtgattcgcgacctgccgctgattgccagcaacttccgtaataccgaagacctctcttcttacctgaaacgccataacatcgtggcgattgccgatatcgatacccgtaagctgacgcgtttactgcgcgagaaaggcgcacagaatggctgcattatcgcgggcgataacccggatgcggcgctggctttagaaaaagcccgcgcgttcccaggtctgaatggcatggatctggcaaaagaagtgaccaccgcagaagcctatagctggacacaagggagctggacgttgaccggtggcctgccagaagcgaaaaaagaagacgagctgccgttccacgtcgtggcttatgattttggtgccaagcgcaacatcctgcggatgctggtggacagaggctgtcgcctgaccatcgttccggcgcaaacttctgcggaagatgtgctgaaaatgaatccagacggcatcttcctctccaacggtcctggcgacccggccccgtgcgattacgccattaccgccatccagaaattcctcgaaaccgatattccggtattcggcatctgtctcggtcatcagctgctggcgctggcgagcggtgcgaagactgtcaaaatgaaatttggtcaccacggcggcaaccatccggttaaagatgtggagaaaaacgtggtaatgatcaccgcccagaaccacggttttgcggtggacgaagcaacattacctgcaaacctgcgtgtcacgcataaatccctgttcgacggtacgttacagggcattcatcgcactgataaaccggcgttcagcttccagggtcacccggaagccagccctgggccacacgacgcagcgccgttgttcgaccactttatcgagttaattgagcagtaccgtaaaaccgctaagtaatcaggagtaaaagagccatgccaaaacgtacagatataaaaagtatcctgattctgggtgcgggcccgattgttatcggtcaggcgtgtgagtttgactactctggcgcgcaagcatgtaaagccctgcgcgaagagggttaccgcgtcattctggtgaactccaacccggcgaccatcatgaccgacccggaaatggccgatgcgacctacatcgagccgattcactgggaagtagtacgcaagattattgaaaaagagcgcccggacgcggtgctgccaacgatgggcggtcagacggcgctgaactgcgcgctggagctggagcgtcagggcgtgttggaagagttcggcgtgactatgattggtgcgaccgccgatgcgattgataaagcagaagaccgccgtcgtttcgacgtagcgatgaagaaaattggtctggaaaccgcgcgttccggtatcgcacacacgatggaagaagcgctggcggttgccgctgacgtgggcttcccgtgcattattcgcccatcctttaccatgggcggtagcggcggcggtatcgcttataaccgcgaagagtttgaagaaatttgcgcccgcggtctggatctctccccaaccaaagagctgctgattgatgagtcgctgatcggctggaaagagtacgagatggaagtggtgcgtgataaaaacgacaactgcatcatcgtctgctctatcgaaaactttgatgcgatgggcatccataccggtgactccatcactgtcgcgccagcccaaacgctgaccgacaaagaatatcaaatcatgcgtaacgcctcgatggcggtgctgcgtgaaatcggcgttgaaaccggtggttccaatgtccagtttgcggtgaacccgaaaaacggtcgcctgattgttatcgaaatgaacccacgcgtgtcccgttcttcggcgctggcgtcgaaagcgaccggtttcccgattgctaaagtggcggcgaaactggcggtgggttacaccctcgacgaactgatgaacgacatcactggcggacgtactccggcctccttcgagccgtccatcgactatgtggttactaaaattcctcgcttcaacttcgaaaaattcgccggtgctaacgaccgtctgaccactcagatgaaatcggttggcgaagtgatggcgattggtcgcacgcagcaggaatccctgcaaaaagcgctgcgcggcctggaagtcggtgcgactggattcgacccgaaagtgagcctggatgacccggaagcgttaaccaaaatccgtcgcgaactgaaagacgcaggcgcagatcgtatctggtacatcgccgatgcgttccgtgcgggcctgtctgtggacggcgtcttcaacctgaccaatattgaccgctggttcctggtacagattgaagaactggtgcgtctggaagagaaagtagcggaagtgggcatcactggcctgaacgctgaattcctgcgccagctgaaacgcaaaggctttgccgatgcgcgtctggcaaaactggcgggcgtgcgcgaagcggaaatccgcaagctgcgcgaccagtatgacctgcacccggtttataagcgcgtggatacctgtgcggcagagttcgccaccgacaccgcttacatgtactccacttatgaagaagagtgcgaagcgaatccgtctaccgaccgtgaaaaaatcatggttctcggcggcggcccgaaccgtatcggtcagggtatcgaattcgactactgctgtgtacacgcctcgctggcgctgcgcgaagacggttacgaaaccattatggttaactgtaacccggaaaccgtctccaccgactacgacacttccgaccgcctctacttcgagccggtaaccctggaagatgtgctggaaatcgtgcgtattgagaagccgaaaggcgttatcgttcagtacggcggtcagaccccgctgaaactggcgcgtgcactggaagccgctggcgtaccggttatcggcaccagcccggatgctatcgaccgtgcggaagaccgtgaacgcttccagcacgcggttgaccgcctgaaactgaagcaaccggcgaacgccaccgttaccgctatcgaaatggcggtagagaaggcgaaagagattggctacccgctggtggtacgtccgtcttacgttctcggcggtcgggcgatggaaatcgtctatgacgaagcagacctgcgtcgctacttccagacggcggtcagcgtgtctaacgatgcgccagtgttgctggaccacttcctcgatgacgcggtagaagtggatgtggacgccatctgcgacggcgaaatggtgctgattggcggcatcatggagcatattgagcaggcgggcgtgcactccggtgactccgcatgttcgctgccagcctacactttaagtcaggaaattcaggatgtgatgcgccagcaggtgcagaaactggccttcgaattgcaggtgcgcggcctgatgaacgtgcagtttgcggtgaaaaacaacgaagtctacctgattgaagttaacccgcgtgcggcgcgtaccgttccgttcgtctccaaagccaccggcgtaccgctggcaaaagtggcggcgcgcgtgatggctggcaaatcgctggctgagcagggcgtaaccaaagaagttatcccgccgtactactcggtgaaagaagtggtgctgccgttcaataaattcccgggcgttgacccgctgttagggccagaaatgcgctctaccggggaagtcatgggcgtgggccgcaccttcgctgaagcgtttgccaaagcgcagctgggcagcaactccaccatgaagaaacacggtcgtgcgctgctttccgtgcgcgaaggcgataaagaacgcgtggtggacctggcggcaaaactgctgaaacagggcttcgagctggatgcgacccacggcacggcgattgtgctgggcgaagcaggtatcaacccgcgtctggtaaacaaggtgcatgaaggccgtccgcacattcaggaccgtatcaagaatggcgaatatacctacatcatcaacaccacctcaggccgtcgtgcgattgaagactcccgcgtgattcgtcgcagtgcgctgcaatataaagtgcattacgacaccaccctgaacggcggctttgccaccgcgatggcgctgaatgccgatgcgactgaaaaagtaatttcggtgcaggaaatgcacgcacagatcaaataatagcgtgtcatggcagatatttttcatccgctaatttgatcgaataactaatacggttctctgatgaggaccgtttttttttgcccattaagtaaatcttttggggaatcgatatttttgatgacataagcaggatttagctcacacttatcgacggtgaagttgcatactatcgatatatccacaattttaatatggccttgtttaattgcttcaaaacgagtcatagccagacttttaatttgtgaaactggagttcgtatgtgtgaaggatatgttgaaaaaccactctacttgttaatcgccgaatggatgatggctgaaaatcggtgggtgatagcaagagagatctctattcatttcgatattgaacacagcaaggcggttaataccctgacttatattctgtcggaagtcacagaaataagctgcgaagttaagatgatccctaataagctggaagggcggggatgccagtgtcagcgactggttaaagtggtcgatatcgatgagcaaatttacgcgcgcctgcgcaataacagtcgggaaaaattagtcggcgtaagaaagacaccgcgtattcctgccgttccgctcacggaacttaaccgcgagcagaagtggcagatgatgttgtcaaagagtatgcgtcgttaatgtcatttcgatgataccgtgcgacctggtcgccggatgcgatgctggcgcatcttatccggcttacggttgctctccagccgggttggataaggcgtttatgccgcatccgacagctatcgccggatgcgatgctggcgcatcttatccggcctacggttgctctccagcagagttggataaggcgtttacgccgcatccggcaagatcaccgtttaggcgtcacatccgttgtcccctgcaaacgggggcgattttcctccatttgcctcaacggctgcgtttcatgtaacgatgcatgatagcgcccgacaagatcctgatactctttggtattcaaccgtttccagtgtaactcgtcgtcactaacactgcgtacagcgcgggctggcgtacccatcaacaactggcgtttctcgccgctaaagcccgctttgacaaagctcatggcggcaacaatgctctcttcgccaatgaccgcgccatccataatcacgctgttcatcccgaccaatgcatcgcgaccaatcacacaaccatgcaggatcgctccgtgcccgatatggccgttttccccaacaatggtgtcagtgtcgcagtagccatgcataatgcagccatcctgaatattggctcccgcttgcacgatcaaccgcccgtagtcaccacgcagtgaggcgagtgggccgatgtagacaccggctcccacaatcacatcgccaatcaagacggcactgggatggacaaacgccgtcgggtgaaccaccggaattaacccctcaaaggcgtaatagctcacggttgttaacgtcctttccacaccggatcgcgcttctcggcaaacgccagcggcccttcaatggcatcctccgaatgcagaaccgacggatagtgtttcaacacgccgctgcgaatatagcgatacgcttcttctaccggcatttcgctggtggtgcggtagatctctttcagcgccgcaatcgccagcggagcgctgttaaccagctgctgcgccagttcgcgggcgttatccatcagttccgcctggctaaccacgcggttgactatcccccaacgcagcgcctcttctgcgcccattcgtctgccggtcatcaccatttcattgacgatggcaggcggcaggatcttcggcagacgcagcacaccgccgctgtcaggaacgatgcccagtttggcttccggcagggcgaagctggcgttatcggcacaaacaataaaatctgccgccagcgccagttcgaaaccgccgccaaaggcgtagccgttcacagctgcgataactggtttgtcgagattgaaaatttcggttaatcccgcaaaaccacccgggccaaagtcagcatccggtgcttcgccttctgctgccgcttttaaatcccagcccgcggaaaagaatttctctccggcaccggtaataatggcgacacgtaattgcggatcgtcacggaaatttagaaatacttcgcccatttcaaagctggtttttgcatcaatagcattcgcttttgggcgatcaagggtaatttccagaattgatccattgcgggtcagatgtaatgattcactcattccttttctccatttttgctttttcagggacgacaacattcctgcaaaaaatgcatattgttttagagcgtgattattagctggcagggtagttccctgccgtttcatttatttcagattctttctaattattttccccgagcaattacgtggcagatcttttctgatctccagataagagggcactttaaatttcgccatattttgttcgcagaagcgaaaaaattcctcttcgctcaatgtttcaccttcattcagcaccacaaatgctttgatggcttcatcgcgaatcgaatctttaatacccacaaccacgatgtcctgaattttcggatgggtggcgatgatattttccagctccacgcaggagacattctcgccaccgcgtttgatcatattgcagcggcgatcgacgaaataaaaaaagccttcttcgtcgcggtatccggtatcgccggtatgcagccagccatcagcttccagcactttcgcagtggctttcgggttgagaaaatactctttgaagatggttttccctggtacgcctttaatacagatttcaccgatctcacctgccgggagcgggcaattgtgatcgtcgcggatctccgcttcgtagcaaaaccccgctcgaccaatcgacggccagcgtcgtttatcgccagggcgatcgccgataatgcccacaatggtttccgtcatcccataagacgtcagcaagcgaacgccgaagcgttcacaaaacgcatctttttcctgctccgacaagttgagataaaacatcacttcccgcaggcggtgttgccgatcgttcgctgaaggcggctgcaccatcaaggtacggatcatcatcggaatacattcggtaacggtggcgcggtacttctgtacctgtccccagaaggcgcgggcgctgtatttctcgaccagcacaaaggtggccccggcagaaaacgccgccatcgccgcagtacactggcaatcgatatgaaacgcaggcattaccgtcaggtagacgtcatcgtcacgcagtgcacactgccaggcggagtaatatccagcgaagcgcaggttgtaatgggtaatcaccacacctttcggtcgggaggtggtgccggaggtgaagagaatttccgccgtatcgtcagtcgatagcggcggtgcatagcacaaggtggcaggttgttgatttttcagttgagtaaacgaactcacgccatcatcagcgggaagtgccacatctgtcaggcaaatgtgccgcaattgagtggcatcttcctgctgaatctgttgatacataggatagaattgcgcactggttaccagcaggcacgcctggctattttgcaggatccacgcgctttcctcgcgtaacaggcgggcgttaatcggcaccataatcgcgccaatttttgccagcccgaaccagcaaaagataaattccgggcagttgtcgagatgtagtgcaaccttgtcgcctttgcgaatccccagcgtataaaacaggtttgccgtgcggttaatctcctgatttaactcaagataactataccggttaacgactccgccgctggattcacaaatcagcgccgttttatgaccgtaaacgtccgcaagatcgtcccacatttgacgtagatgttgtccgccaatgatatccattgcacctctatccatttttgttcgtttgttattgggcgggcgctagtcaggcaagccgactgacgccacgcgtttagtcctcaactttggccagacctttgctgaccaactcctgaatgtcgttttcgctgtagccgatatttttcaaaatggcagccgtgtccatgccatgtgagggcattccgcgccagatttgtccggggttatttttgaatttcggcatgatgttcggccctttgcaggtgcgaccatccatcgtttgccactgagtgattgattcgcgagccacatactgtggattgctttccagttccggtacggtcagcactttggcgcaggcgatattcagttcagcaaagcgttcttttacttccgcgatggtatgtgtcgccagccaggcatcgagtttctcttcaaccagtgggccgtaagggcattcgatacggtggataagctgagtgccttccgggatttctggcgtgccaagcagatgtgcgaggccaatatctttaaagcactcttcaatttgggtaatgcccaccagttccatcacgatgtagccgtcggcacatttatacagaccgcaaccggcgtagtagggatctttacctttgctcatgtgcgggcacatttcgccgccgttgaagtaatccatcatgaagtactggcccatacgcagcatcacttcatacatggcgatgtcgatactttcgcctttaccggtttcacgcgctttatgcagtgctgccagcgccgccgtggtggcggtcaggccagaaaagtaatcggcggtatacgggaaggcaggcattggctggtcaacatcaccgttctgaatcaggtaaccactgaaggcctgggcgatggtgttataggccggaagattggtgtactcctcggtgccgtactgaccaaaaccggacaggtgagcgataaccagtttcgggttgtgctgccacagtacttcatcggtaatgccacgacgggcaaaggccggacctttactggcttcgatgaagatatcggtggtttccattaatttcagaaacgcttcgcggccttcatctttgaaaatatttaacgacagcgcgtgcaaattgcggcgggagagctgcgggtagttcggttgaacgcgaatggtgtcggcccaggcgacgttctcgatccagataacttccgcatcccattctgcgaacatttgcccggcgaacggcccggcgatttcgataccggagaagacaacgcgcaatccggccaacggcccgaatttcggcatgggtagatgatccattattagctcctgaaaaatttatgtagcgcatgactgccggatgcggcgtaaacgccttatccggcctacattcgtgctcccgtaggcctgataagacgcgtcagcgtcgcatcaggcagcgcacggacttagcggtattgcttcagcaccgcacgacccagcgtcaggatctgcatttcgtcagatcctccggaaacgcggtctacacgcaggtcacgccagaagcggctgatgcggtggttgcccgcaatcccgacaccgcccagcacctgcattgcgctatccaccacttcaaatgccgcattggcgcagaagtatttgcacatcgctgcatcgccagaggtgatggtgccgttgtctgctttccacgctgcttcatacagcatgtttttcatggagtttaatttgatcgccatgtgggcgaatttttcctgaatcaactggaaacgaccaatagcctcgccaaactgcacgcgctggttggcgtagcgcgccgcatcttcaaaggcgcacatcgccgtaccgtagttggtcagggctaccaggaaacgttcatggtcgaactcttctttgacgcggttaaagccgttaccttcccgaccgaacatgtctttctcgtccagttccacatcgtcaaaggtgatttcacagcagctatccatacgcagaccgagcttctcaagtttggtcactttgatgcccggtttgctcatatcaacaaaccattcggtgtagacaggtttgtccggagaagccccgtcgcgcgccatcaccacgatgtacggggtgtaggcgctactggtaataaaacacttactaccattaagataaatcttaccatttctacgggtataagtcgttttcaggctacccacgtcggagcccgcgcccggttcggtaatcgctgagttccacatctgcttaccggtgccgcggaaagccataatcttgtcgatctgctcttgtgtgccttcgcgcaggaaggtattgaacccgcccggcaactggtacagtacataggttggtgcccccagacgtcccagctccatccacacggcggcgagagtaacaaaccccgcgtccagaccaccgtgctcttcagggatcagcagactgtcgatacccatatccgccagtgctttgacaaaacgttccgggtagacgctgtcacggtcgcactcggcaaaataggcctcccagttttcgctggccatcagttcgcggataccggcgacaaacagttcctgctcatcatttaaattaaaatccatctttcaacctcttgatattttgggggttaattaatctttccagttctgtttcgcgtctttaataaaggagagcgtcaccataatgttgacgaagaacagcgggcatcctccggcgataatggcggtttgaatcggtttcaggccgccgagcgccagcagaacaataccgataatgccaaccagaattgaccagccgatacgcaccagcagcggtggttcttcaccatcgcgtacttcgcggcaagtggacatcgccagggtataagagcaggcgttaaccagcgtaacggtggcaataaagcagaggatgaagaagccccacatggtggcggtgctgagtggcagagcggcccaggtttcaatgatggcgcgcgccacaccgtactgttcgatcagatttggaatgttgatgatgtttttatctatcaacagcagagtgttactaccgagtacagtccacaggatccaggttgacgctgtcagccccagcaccatgccgaagcacagttcacgcacagtacgaccacgggagatgcgggcgaggaagatactcatctggatagcataaatcacccaccatgcccagtagaacacggtccagccctgcgggaagccgcctttagcgatgggatcggtatagaacaacatgcgcggcagatacatcagcaacatccccaccgaatcggtgaagtagttcatgatgaagctggcaccgctgacaatgaacacccaacccagcatcaggaagctcaggtaactacgcacgtcactggcgatacgtacccctttttgcagaccgcaagcgacgcaaatggcgttgaggataatccagcaggtaatgatgatagcgtccagttgcagggtatgcggaatgccaaacaaccattgcatacactcggtcaccagcggcgtggcaaggcccagactggtacccatcgcgaagatcaaggcgacgagatagaagttgtcgacgatagtgccgaacaaccctttggcgtgtttttcacctaccagcggcaccagtgtcgagctggggcgaatcacttccattttgcggacaaagaagaagtaagcgaaggcgactgaaaggaagctgtaagtggcccacggcagaggtccccagtggaacaagctgtaagccagccccaactctttcgcccctgtcgagttcggttctaagccaaacggcggggtggagatgtagtagtagatctcaatcgatccccagaacagtacggcagcagacgtacaggaggcgaacatcataaagatccaactggcggtgctaaattctggcggttcgttacctaaacgctttttggcatacgggccaaacaccagccagaaccaaccgaaaagcatcaccaccatataccattcaaatgcccatccccatacattggtgacgtaactgaatacagcattaataacgacattcgctgcatccagatctctgactgtaagccaacaaagtatgccgacgattattaacggcggaaagaaaaccttcggttctattcccgtttttctcttttcattcttcatgagttaattccactgtgaaaacgaatatttattttgcgttcccgtttgttttatttttgttaacatttaatataattattattaacctcgtggacgcgttaatggctaactcataatgggtattcaataagctgtattctgtgattggtatcacatttttgtttcgggtgaatagagggcgttttttcgttaattttgattaataatcagtttgttatgctctattgtgagtaaaaaaataacatctgactttcaatattggtgatccataaaacaatattgaaaatttctttttgctacgccgtgttttcaatattggtgaggaacttaacaatattgaaagttggatttatctgcgtgtgacattttcaatattggtgattaaagttttatttccaaattaaagggcgtgatatctgtaattaacaccaccgatatgaacgacgtttccttcatgatttctggagatgcaatgaagattattacttgctataagtgcgtgcctgatgaacaggatattgcggtcaataatgctgatggttcattagacttcagcaaagccgatgccaaaataagccaatacgatctcaacgctattgaagcggcttgccagctaaagcaacaggcagcagaggcgcaggtgacagccttaagtgtgggcggtaaagccctgaccaacgccaaagggcgtaaagatgtgttatcgcgcggcccggatgaactgattgtggtaattgatgaccagttcgagcaggcactgccgcaacaaacggcgagcgcactggctgcagccgcccagaaagcaggctttgatttgatcctctgtggcgatggttcttccgacctttatgcccagcaggttggtttgctggtaggcgaaatcctcaatattccggcagttaacggcgtcagcaaaattatctccctgacggcagataccctcaccgttgagcgcgaactggaagatgaaacagaaacgttaagcattccgctgcctgcggttgttgctgtttccactgatatcaactccccacaaattccttcgatgaaagccattctcggcgcggcgaaaaagccagtccaggtatggtcggcggcggatatcggttttaacgcagaggcagcctggtcagaacaacaggttgccgcgccgaaacagcgcgagcgtcagcgcatcgtgattgaaggcgacggcgaagaacagatcgccgcatttgctgaaaatcttcgcaaagtcatttaattacaggggatgctatgaacacgttttctcaagtctgggtattcagcgataccccttctcgtctgccggaactgatgaacggtgcgcaggctttagctaatcaaatcaatgcctttgtcctcaatgatgccgacggcgcacaggcaatccagctcggcgctaatcatgtctggaaattaaacggcaaaccggacgatcggatgatcgaagattacgccggtgtcatggctgacactattcgccagcacggcgcagacggtctggtgctgttgccaaacacccgtcgcggcaaattactggcggcaaaactgggttatcgccttaaagcggcggtgtctaacgatgccagcaccgtcagcgtacaggacggtaaagcgacagtgaaacacatggtttacggcggtctggcgattggcgaagaacgcattgccacgccgtatgcggtactgaccatcagcagcggcacgttcgatgcggctcagccagacgcgtcacgcactggtgaaacgcacaccgtggagtggcaggctccggctgtggcgattacccgcacggcaacccaggcgcgccagagcaacagcgtcgatctcgacaaagcccgtctggtagtcagcgtcggtcgcggcattggcagcaaagagaacattgcgctggcagaacagctttgcaaggcgataggtgcggagttggcctgttctcgtccggtggcggaaaacgaaaaatggatggagcacgaacgctatgtcggtatctccaacctgatgctgaaacctgaattgtatctggcggtggggatctccgggcagatccagcacatggttggtgctaatgcatcgcaaaccattttcgccatcaataaagataaaaatgcgccgatcttccagtacgcggattacggcattgttggcgatgccgtgaagatccttccggcactgaccgcagctttagcgcgttgatccactctggcagggctgcattacggctctgccgctgacagggagctcttatgtccgaagatatctttgacgccatcatcgttggtgcagggcttgccggttcggttgccgcactggtgctcgcccgcgaaggggcgcaagtgttagttatcgagcgtggcaattccgcaggtgccaagaacgttactggcgggcgtctctatgcccacagtctggaacacattattccaggtttcgccgaatccgcccccgtagaacgcctgatcacccatgaaaaactcgcgtttatgacggaaaagtcagcgatgactatggactactgcaacggtgacgaaacctcgccatcccagcgttcttactccgttttgcgcagtaaatttgatgcctggttgatggagcaggccgaagaagcgggcgcgcagttaattaccgggatccgtgtcgataacctcgtacagcgcgatggcaaagtcgtcggtgtagaagccgatggcgatgtgattgaagcgaaaacggtgatccttgctgatggggtgaactccatccttgccgaaaaattggggatggcaaaacgcgtcaaaccgacggatgtggcggttggcgtgaaggaactgatcgagttaccgaagtcggttattgaagaccgttttcagttgcagggtaatcagggggcggcttgcctgtttgcgggatcacccaccgatggcctgatgggcggcggttttctttataccaatgaaaacaccctgtcgctggggctggtttgtggtctgcatcatctgcatgacgcgaaaaaatcggtgccgcaaatgctggaagatttcaaacagcatccggcagttgcaccgctgatcgcgggcggcaagctggtggaatattccgctcacgtagtgccggaagcaggcatcaacatgctgccggagttggttggtgacggcgtattgattgccggtgatgccgccggaatgtgtatgaacctcggttttaccattcgcggtatggatctggcgattgccgccggggaagccgcagcaaaaaccgtgctttcagcgatgaaaagcgacgatttcagtaagcaaaaactggcggaatatcgtcagcatcttgagagtggtccgctgcgcgatatgcgtatgtatcagaaactaccggcgttccttgataacccacgcatgtttagcggctacccggaactggcggtgggcgtggcgcgtgacctgttcaccattgacggcagtgcgccagaactgatgcgcaagaaaatcctccgccacggtaagaaagtgggcttcatcaatctaatcaaggatggcatgaaaggagtgaccgttttatgacttctcccgtcaatgtggacgtcaaactgggcgtcaataaattcaatgtcgatgaagagcatccgcacattgttgtgaaggccgatgctgataaacaggcgctggagctgctggtgaaagcgtgccccgcaggtctgtacaagaagcaggatgacggcagtgtgcgcttcgattacgccggatgtctggagtgcggcacctgtcgcattctggggctggggtcggcgctggaacagtgggaatacccgcgcggcacctttggtgtggagttccgttacggctgatgttggtttgatacgtaacgccgtactgactctcattgcaaaaaaacaggaataacccatgcaaccgtccagaaactttgacgatctcaaattctcctctattcaccgccgcattttgctgtggggaagcggtggtccgtttctggatggttatgtactggtaatgattggcgtggcgctggagcaactgaccccggcgctgaaactggacgctgactggattggcttgctgggcgcgggaacgctcgccgggctgttcgttggcacatcgctgtttggctatatctccgataaagtcggacggcgcaaaatgttcctcattgatatcatcgccatcggcgtgatatcggtggcgacgatgtttgtttcatcccccgtcgaactgttggtgatgcgggtacttatcggcattgtcatcggtgcagattatcccatcgccacctcaatgatcaccgagttctccagtacccgtcagcgggcgttttccatcagctttattgccgcgatgtggtatgtcggcgcgacctgtgccgatctggtcggctactggctttatgatgtggaaggcggctggcgctggatgctgggtagcgcggcgatcccctgtttgttgattttgattggtcgattcgaactgcctgaatctccccgctggttattacgcaaagggcgagtaaaagagtgcgaagagatgatgatcaaactgtttggcgaaccggtggctttcgatgaagagcagccgcagcaaacccgttttcgcgatctgtttaatcgccgccattttccttttgttctgtttgttgccgccatctggacctgccaggtgatcccaatgttcgccatttacacctttggcccgcaaatcgttggtttgttgggattgggggttggcaaaaacgcggcgctgggaaacgtggtgattagcctgttctttatgctcggctgtattccgccgatgctgtggctaaacactgccggacggcgtccattgttgattggcagctttgccatgatgacgctggcgctggcggttttggggctgatcccggatatggggatctggctggtagtgatggcctttgcggtgtatgcctttttctctggcgggccgggtaatttgcagtggctctatcctaatgaactcttcccgacagatatccgcgcctctgccgtgggcgtgattatgtctttaagtcgtattggcaccattgtttcgacctgggcactaccgatctttatcaataattacggtatcagtaacacgatgctaatgggggcgggtatctcgctgtttggcttgttgatttccgtagcgtttgccccggagactcgagggatgtcactggcgcagaccagcaatatgacgatccgcgggcagagaatggggtaaattgttcagatttctctcttttctgaatcaatattattgactataagccgcgtgaatatatgactacactttgtgggaaaacaaaggcgtaatcacgcgggctacctatgattcttataatttatgcgcatccgtatccgcatcattcccatgcgaataaacggatgcttgaacaggcaaggacgctggaaggcgtcgaaattcgctctctttatcaactctatcctgacttcaatatcgatattgccgccgagcaggaggcgctgtctcgcgccgatctgatcgtctggcagcatccgatgcagtggtacagcattcctccgcttcttaaactttggatcgataaagttttgtcgcacggctgggcttacggtcacggcggcaaggcgctgcatggcaaacatttgctgtgggcggtgacgaccggcggcggggaaagccattttgaaattggtgcgcatccgggctttgatgtgctgtcgcagccgctacaggcgacggcaatctactgcgggctgaactggctgccaccgtttgccatgcactgcacctttatttgtgacgacgaaaccctcgaagggcaggcgcgtcactataagcaacgtctgctggaatggcaggaggcccatcatggatagccatacgctgattcaggcgctgatttatctcggttcggcagcgctgattgtacccattgcggtacgtcttggtctgggatcggtacttggctacctgatcgccggctgcattattggcccgtgggggctgcgactggtgaccgatgccgaatctattctgcactttgccgagattggggtggtgctgatgctgtttattatcggcctcgaactcgatccacaaaggctgtggaagctgcgtgcggcagtgttcggcggtggcgcattgcagatggtgatttgcggcggcctgctggggctgttctgcatgttacttgggctgcgctggcaggtcgcggaattgatcggcatgacgctggcgctctcctctacggcgattgccatgcaggcgatgaatgaacgcaatctgatggtgacgcaaatgggtcgcagtgcctttgcggtgctgctgttccaggatatcgcggcgatcccgctggtggcgatgattccgctactggcaacgagcagtgcctcgacgacgatgggcgcatttgctctctcggcgttaaaagtggcgggtgcgctggtgctggtggtattgctggggcgctatgtcacgcgtccggcgttgcgttttgtagcccgctctggcttgcgggaagtgtttagtgccgtggcgttattcctcgtgtttggctttggtttgctgctggaagaggtcggcttgtcgatggcgatgggcgcgtttctggcgggcgtactgctggcaagctcggaataccgtcatgcgctggagagcgatatcgaaccatttaaaggtttgctgttggggctgtttttcatcggtgttggcatgtcgatagactttggcacgctgcttgaaaacccattgcgcattgtcattttgctgctcggtttcctcatcatcaaaatcgccatgctgtggctgattgcccgaccgttgcaagtgccaaataaacagcgtcgttggtttgcggtgttgttagggcagggcagtgagtttgcctttgtggtatttggcgcggcgcagatggcgaatgtgctggagccggagtgggcgaaatcgctgaccctggcggtggcgctgtcgatggcagcaacgccgattctgctggtgatcctcaatcgccttgagcaatcttctactgaggaagcgcgtgaagccgatgagatcgacgaagaacagccgcgcgtgattatcgccggattcggtcgttttgggcagattaccggacgtttactgctctccagcggggtgaaaatggtggtactcgatcacgatccggaccatatcgaaaccttgcgtaaatttggtatgaaagtgttttatggcgatgccacgcggatggatttactggaatctgccggagcggcgaaagcggaagtgctgattaacgccatcgacgatccgcaaaccaacctgcaactgacagagatggtgaaagaacatttcccgcatttgcagattattgcccgcgcccgcgatgtcgaccactacattcgtttgcgtcaggcaggcgttgaaaagccggagcgtgaaaccttcgaaggtgcgctgaaaaccgggcgtctggcactggaaagtttaggtctggggccgtatgaagcgcgagaacgtgccgatgtgttccgccgctttaatattcagatggtggaagagatggcaatggttgagaacgacaccaaagcccgcgcggcggtctataaacgcaccagcgcgatgttaagtgagatcattaccgaggaccgcgaacatctgtcattaattcaacgacatggctggcagggaaccgaagaaggtaaacataccggcaacatggcggatgaaccggaaacgaaaccctcatcctaataaagagtgacgtaaatcacactttacagctaactgtttgtttttgtttcattgtaatgcggcgagtccagggagagagcgtggactcgccagcagaatataaaattttcctcaacatcatcctcgcaccagtcgacgacggtttacgctttacgtatagtggcgacaattttttttatcgggaaatctcaatgatcagtctgattgcggcgttagcggtagatcgcgttatcggcatggaaaacgccatgccgtggaacctgcctgccgatctcgcctggtttaaacgcaacaccttaaataaacccgtgattatgggccgccatacctgggaatcaatcggtcgtccgttgccaggacgcaaaaatattatcctcagcagtcaaccgggtacggacgatcgcgtaacgtgggtgaagtcggtggatgaagccatcgcggcgtgtggtgacgtaccagaaatcatggtgattggcggcggtcgcgtttatgaacagttcttgccaaaagcgcaaaaactgtatctgacgcatatcgacgcagaagtggaaggcgacacccatttcccggattacgagccggatgactgggaatcggtattcagcgaattccacgatgctgatgcgcagaactctcacagctattgctttgagattctggagcggcggtaattttgtatagaatttacggctagcgccggatgcgacgccggtcgcgtcttatccggccttcctatatcaggctgtgtttaagacgccgccgcttcgcccaaatccttatgccggttcgacggctggacaaaatactgtttatcttcccagcgcaggcaggttaatgtaccaccccagcagcagccggtatccagcgcgtatataccttccggcgtacctttgccctccagcgatgcccagtgaccaaaggcgatgctgtattcttcagcgacagggccaggaatcgcaaaccacggtttcagtggggcaggggcctcttccggcgattctttgctgtacatatccagttgaccgttcgggaagcaaaaacgcatacgggtaaaagcgttggtgataaaacgcagtcttcccagcccccgcaattccggtgaccagttatttggcatatcgccgtacatggcatcaagaaagaagggataggagtcactcgatagcaccgcttctacatcgcgtgcgcactctttggcggtctgcagatcccactgcggcgtgatccctgcgtgggccatcaccagctttttctcttcgtcgatttgcagcagaggctggcgccgcagccagttaagcagctcgtcggcatccggcgcttccagcagcggtgtcaggcgatctttcggtttattgcggctgatcccggcaaataccgccagcagatgcagatcgtgattgcccagcaccagacgtacgctgtcgcctaaggatttcacatagcgcagaacatccagcgaacccggcccgcgcgcgaccagatcgcccgtcagccagagggtatctttcccaggggtaaattctactttatgcagcaatgcgatcagttcatcgtaacaaccatgaacgtcgccaataaggtatgtcgccatattcttttaatgaatgagtgtgggaacggcgagtcggaatacgggaatgtcgatgctgaaagggacgccattttcatcgatcatttcgtagtgaccctgcatggtgcccagcggggtttcaatgattgcaccgctggtgtactggtactcttcgccaggcgcgataagtggctggacgccaaccactccttcgccctggacttcggtttcacggccattgccattggtgatcagccagtaacgccccaacaactgcactggcgctcgccccagattgcgtatggttacggtataagcaaaaacgtaacgttcattatcaggtgaagattgagcctcaatgtagacgctttgaacctgaatacacactcggggcgaattgatcatcgttaactctcctgcaaaggcgcgttctccgccagatagttcgccatctggcaatattgcgcgacagagatattttccgctcgcatcgccgggtcgatccccattcccgttaacacctcgacgctaaacaggttgccgaggctgttacgaatggttttacgacgctggttaaaggcttcggtggtgatgcggctcaacacacgaacatctttaaccgggtgaggcatcgttgcatgaggaaccaggcgcacgacggcggaatccactttgggtggtggtgtaaaggctgacggcggtacttccagtaccgggatcacattgcaatagtattgcgccatgacgcttaatcgaccatacgctttgctgttcggtcctgcaaccagacgattcaccacctctttttgcaacataaagtgcatgtcggcaatggcatcagtatagctaaacagatggaacatcaacggcgtggagatgttataaggcaggttgccgaaaacacgcagcggctgacccattttctcggccagttcaccaaagttaaaggtcatcgcatcctgctgataaatcgtcagtttcgggcctaagaatggatgcgtttgcagacgtgccgccagatcgcggtcaagttcgatgaccgtcagctggtccagacgttcgccgaccggttcggtcaatgccgccagaccggggccgatttcgaccatcgcctggcccttttgcggattaatggcagacacaatactgtcgatcacgaactgatcgttgagaaagttttgcccgaagcgtttacgggctaagtggccctggtggactcgattattcattgggtgttaacaatcattttgatggcgagattaagcgccgtaataaaactgccgacatcggctttgccacgtcccgccagttcaagcgcggtgccgtggtccactgatgtgcgaataaagggcaggcccagcgtaatgttcacaccgcgcccgaagccctggtattttagcacgggaagaccctgatcgtggtacatcgccagcacggcgtcggcgttatcgagatatttcggctgaaacagggtatcggcaggcagcggcccgttgagtttcatcccctgcgcccgcagctcgtcgagcaccggaataatggtgtctatctcttccgtacccatatgaccgccttcgcccgcgtgcggattcagcccgcagaccagaatgcgcggttcggcaataccaaatttggtacgcaaatcgtgatgcaaaatagcaatcacttcgtgcaaaagtgcaggggtgatagcatctgcgatatcgcgcagcggtaaatgcgtcgttgccagcgccacgcgaagttcttcggtcgccagcatcatcaccacctttttcgcctgcgaacgctcttcgaaaaactcggtatgaccggtaaacggaatgcctgcgtcgttaatgacgcctttatgcacggggcctgtgatcagcgcagcaaattcaccgttcagacagccatcacacgctcgcgccagcgtctccaccacgtaatgcccattttcaatcgctaactgccccgcagtgacagattcacgtagcgcgacaggaagtagcgttaatgtgcccgtagtttgcggttgtgcaggggagttgggggaataagggcggagggtgagcggcaaaccgagcatcgctgcccggtcggtaaggagagtggcatcggcacaaacaaccagttcgaccggccactcacgctgtgcaagctggacaactaagtccgggccaatcccggcgggctcgccgggagtgatcacaacacgttgggttttaaccattagttgctcaggattttaacgtaggcgctggcacgttgttcctgcatccagcttgctgcttcttccgagaacttacggttcatcagcatgcggtatgcacgatctttctgcgcagcgtcggttttatcgacattacgggtatccagcagttcgattaaatgccagccgaatgaagagtgaaccggtgcactcatttgacctttgttcaggcgagtcagggcgtcacggaaggccggatcgaaaatatctggtgtagcccagccgagatcaccgccctggttagcagagcctggatcctgagagaactctttcgctgcggcagcaaaagtcgttttaccactcttgatatcagcagcaatctgttccagtttcacacgggcctgttcgtcagtcatgatcggcgacggtttcagcagaatatggcgagcatgaacttcggtcaccgagatatttttgctttcgccgcgcaggtcgttaactttcagaatatggaagccaacgccggaacgaatcgggccaacaatgtcgcctttcttcgcggtgcttaatgcctgggcgaagatcccgggcaactcctgaatacggccccagcccatctggccgccgttcagcgcctgctggtcggcagaatgagcaatcgccagcttaccgaaatcagcgccgttacgcgcctgatcgacaatggcgcgcgcctggctttccgcttcgttcacctgatcagaggtcgggttttccggcagcgggatcaggatgtggctcaggttcagctcagtgctggcgtcgttttggttacccacctgctgcgccagggattcgacttcctgcggcaggatggtgatgcgacgacgcacctcgttgttacgcacttcagagataatcatctctttgcggatctggttacgataggtgttgtagttcagtccatcgtaagccagacggctgcgcatctgatccagcgtcatgttgttctgtttcgcgatgttagcaatcgcctgatccagctgctcatcggagattttcactcccattttctgccccatctgcaggatgatttgatccatgatcaaacgttccatgatttggtggcgcagcgtcgcgtcatcaggaagttgctgccttgcctgagcagcgttcagttttaccgactgcattaatccatcaacgtcgctttccagcacgacgccgttattgacgacggctgcgactttatcgactacctggggggcagcgaaactggtattcgcgatcatggcgataccgagaagcagcgttttccagttcttcatactttttccatttcaattaaccgcactgcggattacgtggtaaatcaacaaatcacaaagtgttttgatacggcagaatgttcgaacgcagcatctcttgcgtacccagaccgtagttggagctcaggccgcgaagttcgatgttaaagccgattgcgttgtcatataccgcatgttgtttatcgttatcccaaccgttcagcttccgctcgtaaccgacgcgaattgcatagcagcaggagctgtattgcacacctaacatagagtcggcttgcttgttcgcattggtgtcgtagtagtaggccccaacaatggaccaacgatcggcaattggccagctggcgacagcacctacctgcgaaataccattcttatattgctcagcagtggaatagtacttaggcagcgtagcctgaatatattccgggctggcgtaacggtaattcagctgtaccagacggtcttcatcccgacggtattcaatgctggagttactggtcgctacgttatccagacgtgtatcgtactgaatcccgccacgcaatccccaacgctcggagatacgccagtaagtatcgcctgcccacaccagtgaacccgttttgtcgtcattctcccatgttatgttgtcatcgccagtgcgagactccgtgaaatagtagatttgaccaacggaaatattaaaacgttcaacggcagcatcatcatatatgcgagatgtgacaccggtcgtcacctggttagcggaggcaatacggtcaagaccgccgtaagtccggtcccggaacaggccagagtagtcagattgcagcagagacgagtcgtagttatagatgtcgctctgatcgcgatacggcacgtacaaatactgcgcgcgcggttccagcgtttgggtataacccggagccagcatttccatatcgcgttcaaagaccattttgccgtcaactttgaattgcggcattacgcggttaacggattcgtccagcttggtcgtgtttctggagttataccagtcaagattggtttgctgataatgggttgccagcaacttcgcttcggtattgatgctgccccagttattagagagcggcaaattgatggtcggttccaggtgaacacgggttgcttcaggcatgtcgtctctggtgttaacaaagtgcactgcctggccgtaaatacgcgtatcaaacggaccaacatcattctggtagtaattaacgtctaactgcggctctgccgagtagctactggtgttctgttcgctgaaaacctggaactgcttggttgaaacggtggcattgaagttttgcaccgcatagccaacgctgaatttttgcgttgcgtagccgtcagtactggaaccgtacttgttatcgaaatcattgaagtagctaggatcgctgaccttggtgtagtcgacgttgaaacgccacacctgatccatgaccccggagtggttccagtagaataaccaacgacgtgaactgtcatcgttcgggtgttcatcttcatagactttatctgaaggcagatagtccagttccatcaagccagcgcccgcctgggagaggtagcggaattcgttctcccacatgatgttgccacgacgatgcatataatgcggcgtgatggtggcatccatatttggcgcgatgttccagtaatatggcaggtagaactcaaagtagttggtggtggtgtacttggcgttcgggatcaagaaaccagagcgacgtttgtcacccaccggcaactgcaaataggggctataaaagatcggtaccggacccaccttaaagcgggcgttccagatctccgcaacttgttcttcgcggtcatgaataatttcgctacctaccacgctccaggtgtcagaacccggcagacaggaggtaaagctaccgttatccagaatggtatagcggttttcgccacgttgtttcatcaggtccgctttaccgcgaccctggcgacccaccatctggtaatcaccttcccagacgttggtatctttggtgttcagattcgcccagcctttcggccctttgaggatcacctggttatcgtcgtaatggacattaccgagcgcatcaacggttcgtaccggctccggttgtcctggtgcctctttttgatggagctgcacttcgtcggcctgcagacggctgttaccctgcatgatatccacgctgccagtaaacacggcgtcatccgggtagtcccctttcgcgtggtcagcattgatagtcacgggtaagtcattggtatcgccctgtaccagaggacggtcatagcttggcacgcccaacatgcactgtgaggcgaggtcggctgccagtccctgttgactataaagggcggtggcaatcatggtggccaggagagtggggatacgttttttcatacgttgattttattgttccatcatcggtaacgttgcgcgtgacaaacggtcagagactaacgtactcgtcatctctacgctagtgttaatcctgtccgaatagcgtcagtggtgttaggcacggcattgaatgacaggtatgataatgcaaattataggcgatgtcccacaattgaccgcagccggaaaacggtaaaagcacctttatattgtgggagatagccctgatatccgtgtgtcgatttggggaatatatgcagtattggggaaaaatcattggcgtggccgtggccttactgatgggcggcggcttttggggcgtagtgttaggcctgttaattggccatatgtttgataaagcccgtagccgtaaaatggcgtggttcgccaaccagcgtgagcgtcaggcgctgttttttgccaccacttttgaagtgatggggcatttaaccaaatccaaaggtcgcgtcacggaggctgatattcatatcgccagccagttgatggaccgaatgaatcttcatggcgcttcccgtactgcggcgcaaaatgcgttccgggtgggaaaatcagacaattacccgctgcgcgaaaagatgcgccagtttcgcagtgtctgctttggtcgttttgacttaattcgtatgtttctggagatccagattcaggcggcgtttgctgatggttcactgcacccgaatgaacgggcggtgctgtatgtcattgcagaagaattagggatctcccgcgctcagtttgaccagtttttgcgcatgatgcagggcggtgcacagtttggcggcggttatcagcagcaaactggcggtggtaactggcagcaagcgcagcgtggcccaacgctggaagatgcctgtaatgtgctgggcgtgaagccgacggatgatgcgaccaccatcaaacgtgcctaccgtaagctgatgagtgaacaccatcccgataagctggtggcgaaaggtttgccgcctgagatgatggagatggcgaagcagaaagcgcaggaaattcagcaggcatatgagctgataaagcagcagaaagggtttaaataagttttaaactgtaggcctgataagacgcggcccgcgtcgcatcaggcaatcggcgcacaattgccggatgcggcgtgaacgccttatccgcctaccgaactgcgccagcgtgacgattaaaaatccgctggcgctttaaacgtcatactattgccatacgccggatgggtaatcgtcaacatctctgcatgtagcaacaaacgcggtgccatcgctctcgcttctggtgatgcataaaaacgatcgccgagaatcggatgccccagcgccagcatatgcacacgcaattgatgcgaacgcccggtaatcggttttaacaccactcttgccgtgttatccgccgcatactccaccacttcatattccgtctgcgcaggtttacccgtttcgtaacagactttctgtttcgggcggtttggccagtcgcaaatcagcggcagatccaccagaccttctgcgggggatggatgcccccagacgcgggccacatactgctttttcggctcgcgctcgcggaactggcgttttaactcccgctccgcggctttggtcagcgccactacaatcacgccgctggtagccatatccagacgatgcaccgattctgcctgcggataatcacgctgaatgcgcgtcatcacgctgtctttgtgctcttccagacgacccggcactgacaacaaaccgctcggcttgttgaccaccataatatggtcatcctgatacaggataaccaaccagggttcctgcggtggattgtagttttccatccccattttcggctccgttactgatgcgttacaacgatcaaacgcagggcatccagacgccaacctgcctgatccaggctttccattacctgctgacggttgctctcaatggcggtcagttcgtcgtcacgaatgttcgggttcactgcacgcagagcttccagacgagacagctcggcagacagtttttcgtcggcttcgttacgcgctgcatcaatcaatgcacgggcagatttctcgatctgcgcttcacccagttgaaggatagcgtgaacatcctgctgcacggcgttaaccagtttgctgccggtgtgacggttaaccgcgttaagctggcggttaaaggtttcaaactctacctgcgccgccaggttgttgccgtttttatccagcagcatacgtaccggcgtcggtggcaggaagcggttgagctgcaactgcttcggagcctgggcttcaaccacataaatcagttccaccaacagcgtacctaccggcaacgctttgttttttaacagtgaaatcgtgctgctaccggtatcgccagaaaggatcagatccagaccgttgcggatcagcggatgctcccaggtaataaactgtgcatcttcacgcgccagcgccacttcacgatcaaaggtgatggtgatgccatcttccgacaggccagggaagtccggcaccagcatatgatcggacggcgtcagcacgatcatgttgtcgccgcgatcgtcctgattgataccgataatatcgaacaggttcatggcgaaggcgatcaggttggtatcgtcatcctgctcttcaatgctttctgccagtgcctgggctttttcgccaccgttggagtggatttccagcaggcggtcacgaccctgttccagctgtgctttcagcgcttcatgttgctcgcggcagtttttgatcagatcgtcaaagccttcggtttgatccggtgaagccagatagttaatcagatcgttgtatacgctatcgtaaatagtgcgtccggtcgggcaggtgtgctcaaatgcatccagaccttcgtgataccagcgcaccagcaccgactgagcggttttctccagataaggcacatggatctgaatatcgtgcgcctggccgatacgatccagacgaccaatacgctgctccagtagatccgggttgaatggcaggtcaaacatcaccatgtggctggcgaactggaagttacgtccttcagaaccgatttccgagcacagcagtacctgtgcgccggtgtcttcttcagcaaaccaggcggcagcgcggtcacgctcaataatcgacatgccttcgtggaacacagcagcgcggataccttcacgttcgcgcagtacttgctccagttgcagcgcagtggcagctttagcgcagatcaccagcactttctgagagcgatggctggtcaggtagcccatcagccactcaacgcgcggatcgaagttccaccaggtggcgttatcaccttcaaattcctgataaatacgctccgggtagagcatatcgcgagcacgatcttccgcacttttacgtgcgcccataatgccggagactttaatagccgtctgatactgcgtcggtagcggcagcttaatggtgtgcagctcgcgtttcgggaatcctttcacaccgttacgggtgttacggaacagcacgcggctggtgccgtggcgatccatcagcatcgaaaccagttcctgacgggcgctctgggcatcttcgctgtcgctgtttgctgcttgcaacagcggctcgatatcctgctcgccgatcatctcgccgagcatgttcagttcgtcattgctcagtttgttacctgccagcagcatggcaacggcgtccgcaaccggacgataatttttctgctcttcaacgaactgcgcaaaatcgtggaaacggttcgggtccagcagacgcagacgggcgaagtggctttccatccccagctgttccggggtcgcggtcagcagcagaacgcccggcacgtgctctgccagttgttcaatggcctgatattcacggcttggcgcatcttcgctccacaccaggtgatgcgcttcatcgaccaccagcaggtcccattcggcttcacagagatgttccaggcgctgtttgctacgacgggcaaaatccagcgagcaaatcaccagctgttcggtgtcaaacgggttgtaagcatcgtgctgagcttcggcataacgctcatcatcaaatagcgcaaagcgcaggttgaaacggcgcagcatttctaccagccactgatgctgtaaggtttccgggacgataattagcacacgttcagcagcgccagagagcagttgctgatgcaggatcatcccggcttcaatggttttccctaaacccacttcgtcagccagcaggacgcgcggcgcgtggcggcgaccaacatcatgagcgatgttgagctgatgcgggatcaggctggtacgctgaccgcgcaggccgctgtacggcatacggaactgttcgctggaatatttacgcgcgcgataacgcagcgcaaagcggtccatacggtcaatctgcccggcaaacagacggtcctgcggtttgctgaacaccagtttgctatcaaggaaaacttcacgcagggctacgccggactcttcagtatccaggcgagtaccgatataggtcagcaagccattttcttcttttacttcttcgacttgcatctgccagccgtcatggctggtaatggtatcaccagggttgaacatcacgcgggtcacgggggaatcactgcgtgcgtacagacggttttcaccagtagatgggaaaagtaaagtgacagttcgcgcatccaccgcgacaacggttccaagtcccaattcgctttctgtatcgctgatccagcgttgaccaagtgtaaaaggcatatgtgttcggctctatatctttaattgcaggcaataaccacccgctaccgtgcttatgaggtagtggtgttattcaggtccaggaatggaaagggcgctatggtactggatggcaaagcattcgtcacgcatcaaaatggtatctggcgaactcttttttttgctcaaaatagcccaagttgcccggtcataagtgtagcaaaattatcctcaataaaagggagtattccctccgccacgggttgtagctggcgggtcagatagtgttcgtaatccagtggtgaacgttggtagtccagcggctccgggccgttggtggtccatacgtacttaatggtgccgcgattctgatattgcaaggggcgaccacgcttttggttttcttcatcggcaaggcgagcggcgcgtacatgaggcggcacattacgctgatactcgctcagcggacggcgaaggcgtttacggtaaaccagtcgcgcatccagttcacccgccatcagtttgtcgatggtttcgcgtacatattcctgatatggctcgttgcggaagatgcgcaggtatagctcctgctgaaactgctgggccagcggcgtccagtcggtgcgcacggtttccagccctttaaacaccatccgctgcttgtcgccctcctgaatcagtccggcataacgctttttactgccggtatcggctccgcgaatggttggcatcagaaaacggcagaaatgggtttcatactccagttctaatgcgctggtcagccgttgtttttgcagcgtttccgcccaccaggcgttaacgtgctgcaccagtgcacgaccgattttcgccgcttcttcttccgaatgtgcgcctttcagccagacaaacgttgagtcggtatcgccgtagataacgtcgtagccctgtgcttcaatcaacgctttggtttgccgcatgatctgatgaccacgcatggtgatcgacgatgccagccgcggatcgaagaagcggcaggcggtggtgccgagcacgccataaaaggcattcatgatgattttcagcgcctgcgacagcggtttgttaccctggcgtttggcttcatcgcgcccgtgccagatgttagtcacaatctccggcaggcaatgtttctcccgcgagaaccaggcatcgagaaagccttcggtgctgtgctctggatcaggctgcgccatgccttccaccagcccgacgggatcaatcagaaaggtgcggatgatcgacgggtacaggcttttatagtccagcaccagtaccgaatcataaagccctggccgtgaatccatcacgtagccgccagggctggcgtgtggcggcacttcgccgagattaggcgcgacataaccagcgcggtgcatacgaggaaaatagagatgaccaaacgccgccaccgatcccccgtggcggtccaccggcaggccgttcaccgttgcccgttcgagtaaaaatggcatgatttcagttttgtggaagatctgcgtcaccagctcgcaatctttcaggttataagttgccagcgcaggtttatcttcggcgaaacggcggtcaatttcgtccattcgatcccacgggttatcgatagattttccttcgcctaatagctcctgagcgacagtttccagcgagaatgaagagaaattccagaacgcggatttcagcgcctcgataccgtcgataattagccgacctttagccagggcaaaaaagacgccgtttttaaagccgtgctcgcgccactccagctcgctattatcgcgcccaagacgcagcggaagacggtaacgctcggcatgtttttgcagcattcgcagatcgaactgcaccacgttccaaccgatgatcacatcaggatcgtagttggcaaaccaggcgttgagtttttccagcaactgcgggcggctggtgacgtattccagttcgaaatcaagcgaggaggcgtcgccattctccggccccagcatataaacgatgcgctgcccgcagccttccaggccgatgcagtacagctcaccgtggcgggtggtttcaatatctatagaaacccacttgagcggcggacgatagtcgggatgcggtttcagacgggcattaacgatagtgccattgtgcatatcaccctcgacccacaccggtgaggtgataaaccgctccatcagatagcgttctggcggacgcacatcggcctcgtagacggtaacgccaccttcacgcaggcgcttttcgtaattcatcaattggcgatgggcgcgacagtaaaggccatacaccggctggcggtgaaaatcctttaacgccagcggtgtcaggcgaaagccttgttcaccctgcaaaatatgctgagcgcggggaacctgatcggcgggaataaacgccacggactcttgcggtgcaagcgtaacctgcaacggcccgttgtccgtcgccagccagaaggagacttctgtcccttgcggggtgtcccgccagtgtcgggttaagataaaacctgcctgcgccacgctgtaattccatcaaaaaaccaggcttgattatagcctggtttcgtttgattggctgtggttttatacagtcattactgcccgtaatatgccttcgcgccatgcttacgcagatagtgtttattcagcagcgtttgctgcatatccggtaactgcggcgctaactgacggcagaatatccccatataagcgacctcttccagcacgatggcgttatgcaccgcatcttcggcatttttgccccatgcaaatgggccgtgagaatggaccaggacgccgggcatttgcgctgcatcgataccctgtttttcgaaggtttctacgatgacgttaccggtttcccactcatattcaccgttgatttctgcgtcggtcattttgcgggtgcagggaatggtgccgtagaaatagtcggcgtgggtggtgccggttgctggaatcgactggcccgcctgcgcccagatagtggcgtggcgcgagtgtgtgtgcacaatgccgccaatggacgggaatgcctgatagagcagtcggtgagttggcgtatcggaggagggctttttcgcaccttcaaccacttcaccggtttcgatgctaaccacgaccatatcgtcagcggtcatgatgctgtaatcgacgccggaaggtttgatcacaaagacgccgcgctcgcgatcaacggcgctgacgttgccccatgtgagcgtgaccaggttatgttttggcagcgccaggttggcctctaatacctggcgtttgagatcttctaacatgttgactccttcgtgccggatgcgctttgcttatccggcctacaaaatcgcagcgtgtaggcctgataagacgcgccagcgtcgcatcaggcgttgaatgccggatgcgctttgcttatccggcctacaaaatcggaacgcgtaggcctgataagacgcgccagcgtcgcatcaggcgttgaatgccggatgcgctttgcttatccggcctacaaaatcgcagcgtgtaggccagataagacgcgtcagcgtcgcatcaggcgttacataccggatgcggctacttagcgacgaaacccgtaatacacttcgttccagcgcagcgcgtctttaaacgctggcaggcgtgtgtcgttatcaatcaccgtgatttcaatgtcgtgcatctcggcgaattggcgcatatcgttgaggttcagtgcatggctgaagacggtatggtgcgcgccaccagcgaggatccacgcttcggaagcagttggcagatccggttgcgctttccacagcgcattcgccaccggcagtttcggcagggagtgcggtgttttcaccgtgtcgatgcagttaaccagtagacggtaacgatcgccgagatcaatcaagctggcgacaatcgctgggccggtttgggtattgaagatcaggcgggcaggatcgtccttaccaccaataccgagatgctgaacgtcgaggatcggtttctcttctgcggcgatcgacgggcagacttccagcatatgggagccgagcaccaggtcattacctttctcgaagtgataggtgtagtcctccataaaggaggtgccgccctgcagaccggttgacatcaccttcatgatgcgaagcagggcggcagttttccagtcgccttcgcccgcaaagccgtaaccctgctgcatcagacgctgtacggccagaccaggaagctgtttcagaccgtgcaaatcttcaaaggtggtggtgaacgcgtggaagccaccttgttccaggaaacgcttcatccccagctcaatacgcgccgcttccagcacgttctgtcgttttttgccgtggatttgtgtggcaggcgtcatggtgtagcagctttcgtactcatcgaccagcgcgttaacatcgccgtcgctgatggagttcaccacctgcaccagatcgccaaccgcccaggtattgacggagaaaccgaacttgatctgtgcggcaactttatcgccatcggtgaccgccacttcacgcatgttatcgccaaatcggcagactttcagatgacgggtatcctgtttagagaccgcctgacgcatccaggagccgatacgctcatgggcttgtttatcctgccagtgaccggtaaccacggcatgttgctgacgcatacgcgcgccaatgaagccgaactcgcgaccgccatgtgcagtctggttcaggttcataaagtccatatcgatactgtcccacggcagcgccgcgttgaactgggtgtggaattgcagcaacggtttgttgagcatggtcaggccgttgatccacattttggccggggagaaggtgtgcagccacaccaccagaccagcgcaacgatcgtcgtaattcgcgtcgcggcaaatagcggtgatttcatccggcgtggtgcccagcggtttcaacaccagtttgcagggcagtttcgcttccgtattcagcgcattaacgacgtgctcggcatgttgggtgacctgacgcagggtttccgggccatacagatgctggctgccaatgacaaaccacacttcataattatcaaaaatcgtcattatcgtgtccttatagagtcgcaacggcctgggcagcctgtgccggggcggaagttggaagatagtgttgttcggcgctcatcgcccattgctgatagcggcgataaagctgttcaaagcgttgtgcctgctcgctgcacggttgcagggttttctctaccgcactggccattttttgctgagctgatgggatgtctgcgtgcactttcgcggcgacggcagcaaaaatcgccgcaccgagcgcacagcactggtcagaggcaacaatttgcagcgggcgattcagcacgtcgcagcaggcctgcataatgacctggtttttccgcgcgatgccgcccagtgccatcacgttattaacggcgatcccctgatcggtaaagcactccatgattgcgcgtgcgccaaaggcggtggcagcaatcaaaccgccgaacagcagcggagcgtcggtagcgaggttaagatcggtaatcacccctttcaggcgttggttagcgttcggtgtgcggcggccgttaaaccagtcgagcaccaccggcaggtgatccagagacggatttttggcccatgcttcggtcagcgccggaagcagttgtttctggctggcgttgatttgcgttttcagttccggatgctgggcggcaagctgttccagcggccagccgagtacgcgaccaaaccaggcgtagatatcaccaaacgccgattggcctgcttccagaccgataaatccaggcaccacgctgccatcaacctgaccgcaaatacctttaactgcccgctcgccaacgctctgtttgtcggcaatcagaatgtcgcaggtggaagtaccgataacttttaccagtgcgttaggctgtgcgcctgcgccaactgcgcccatatggcagtcaaacgcgccgccggaaatcaccacgctttcaggcaggccgagacgctgcgcccattccgggcataaggtgcccaccggaatatcggcagtccaagtgtcagtgaacagcggggaaggcaaatggcgattgaggatcgggtccagctcatcaaagaaactggctggcggcaggccgccccagctttcgtgccacagagatttatgcccggcgctgcaacgtccgcgacgaatatcctgcgggcgggtggtaccggaaagcagagctggcacccagtcgcacagctcaatccacgatgcggcagattgcgccacggcgctgtcctggcgagtcacatgcaggatttttgcccagaaccattcgctggaataaataccaccaatgtagcgggagtagtcaacgttgcccggcgcgtggcacaaacgggtaatctcttccgcttcttcaaccgcagtgtggtctttccacaatacgaacatcgcgttcgggttttcggcaaactccgggcgcagcgccagcacgtttccgtcggcatcaatcggtgcgggcgtcgagccggtactgtcaacgccaatcccgaccacagctgcgcgctgttcgacgctaagctctgcaagcacggttttcagtgccgcttccattgactcaatgtagtcacgcggatgatgacggaactggttattcggggcatcacaaaattgccctttctgccaacggggataccactctacgctggtggcgatctcttcaccggtagcgcagtccaccgccaaagctcgcacagaatcactgccaaaatcgaggccaattgcaatcgccatcgtttcactccatccaaaaaaacgggtatggagaaacagtagagagttgcgataaaaagcgtcaggtaggatccgctaatcttatggataaaaatgctatggcatagcaaagtgtgacgctgtgcaaataatcaatgtggacttttctgccgtgattatagacacttttgttacgcgtttttgtcatggctttggtcccgctttgttacagaatgcttttaataagcggggttaccggttgggttagcgagaagagccagtaaaagacgcagtgacggcaatgtctgatgcaatatggacaattggtttcttctctgaatggtgggagtatgaaaagtatggctgaagcgcaaaatgatcccctgctgccgggatactcgtttaacgcccatctggtggcgggtttaacgccgattgaggccaacggttatctcgatttttttatcgaccgaccgctgggaatgaaaggttatattctcaatctcaccattcgcggtcagggggtggtgaaaaatcagggacgagaatttgtctgccgaccgggtgatattttgctgttcccgccaggagagattcatcactacggtcgtcatccggaggctcgcgaatggtatcaccagtgggtttactttcgtccgcgcgcctactggcatgaatggcttaactggccgtcaatatttgccaatacgggtttctttcgcccggatgaagcgcaccagccgcatttcagcgacctgtttgggcaaatcattaacgccgggcaaggggaagggcgctattcggagctgctggcgataaatctgcttgagcaattgttactgcggcgcatggaagcgattaacgagtcgctccatccaccgatggataatcgggtacgcgaggcttgtcagtacatcagcgatcacctggcagacagcaattttgatatcgccagcgtcgcacagcatgtttgcttgtcgccgtcgcgtctgtcacatcttttccgccagcagttagggattagcgtcttaagctggcgcgaggaccaacgcattagtcaggcgaagctgcttttgagcactacccggatgcctatcgccaccgtcggtcgcaatgttggttttgacgatcaactctatttctcgcgagtatttaaaaaatgcaccggggccagcccgagcgagtttcgtgccggttgtgaagaaaaagtgaatgatgtagccgtcaagttgtcataattggtaacgaatcagacaattgacggcttgacggagtagcatagggtttgcagaatccctgcttcgtccatttgacaggcacattatgcaagcattgctggaacactttattacccaatccaccgtgtattcattgatggcggtggtgttggtggcctttctggagtcgctggcgctggtcggtttgattctacccggtacggtgctgatggcggggctgggagcgctgattggcagcggcgagttaagtttctggcacgcctggctggcagggattattggctgcttgatgggcgactggatttctttctggctgggttggcgttttaaaaagccgttgcatcgctggtcatttctgaagaaaaacaaagcactacttgataaaactgaacatgcgttgcatcaacacagcatgttcaccattctggtcggtcgttttgttggcccgacgcgtccgctggtgccaatggtggcgggaatgctggatctgccggtggctaaatttattacgccgaatattatcggctgcctgctgtggccgccgttttacttcctgccagggattctggcgggcgcggcgatcgatattcctgccggaatgcagagcggtgagtttaaatggttgctgctggcaacagcggtgtttttgtgggttggtggctggctgtgctggcggttatggcgcagcggtaaagcgactgaccgtttgagtcattatttgtcccgcggtcgtttgttgtggctgacgccgttgatttctgccatcggcgtggtggcgctggtggtgttaattcgccacccgttgatgccggtgtatatcgatattttgcgtaaagtggttggggtttaggagatagtcttgtgcgggttgcctgatgcgacgcttgccgcgtcttatcaggcctacaaaacgcactacccgtaggtcggataaggcgttcacgccgcatccgacagtgcatactaacccgtaatccccaatagtgccgaagcactcgccttaccgctcaacaactcattggtcataccctgccaggcgatgcgcccgtcggcgactactaccgagcgcgtggcgatccgcgccgcatcttccacgctgtgcgacaccatcaatagcgtcattttttgctgctggcagctcgtgctcaccagcgtcaacatctcctgacgtaacgccggatcgagcgcagagaacggttcatcgagcaataaaatcggctgttcgcgtaccagacaacgcgctaacgccactcgctgtcgctgaccgccggaaagctcgcccggtaaccgcgccattaaattatcaatccccatctggcgggcgatagcgtgcattttcccctgctgtaccgcgttcagtttcaatcccggatttagccccagcccgatgttctgtgcgaccgtcaggtggctgaacaggttgttctcctgaaacagcatcgacaccggacggcgtgacggcggcatagttgtgtgatctacgccatcgatagtcagcgaaccgctggctggcgtcagaaaaccggcgatcaaattcagcagggtacttttacccgcgccgcttggcccgaggatcgccacctgctcgccgcgttccaccgttaagctaaaacgcatcggcaaatggtggtaaagccaggtgatatcagtcagttttaacatttcgccccggtagtttttcaatcacggtaaacagcagaaaacagagcagcagcagaattaacgcggtgaccgcaccgtcctggctgcgataggagccaatttgctggtagagataaaacggcagggtgcggaaatcatcgttaccgaacaacgccaccacgccaaaatcaccaatcgacagcacgcatgcaaaggccagcgcctgcgccagtggacgtttcagggcgcgcagctccaccacttttaagcgtgaccagccttcaatccccagcgactgacataacatgctgtagcgggcggtgatatcgcgcatcgggttttccagcactttcagcgcataagggatcgccattaacgcattggtgaaaatcacaatgccgtcagcagattgtggcaggccgatagtgttgttgagcagtaaaaagaagccggtagccagcacaatccccggcatggcgaggatcaacatgccgctcatctccagcacctgacccgccagcattttctgccgcgcccgcagttcgcgactgctccatagcagcatcatggtcagcactacgcacaatacacctgccgccagcgcaatacgcaacgaggtccacagcgcctgccacagcaccggttgtgccagcacttccggcaactggcgatttaccccatcgacgatcaccgccagtaacggtggcagcaacagcagcagcgccagcacaattaacaccgtgtcgcaaatgcggctatgcagacgatcgtccgggtcgcgccagccttgcagcagcgtggtgccgggcgcaatggccttactcaatcgctgactcaacagcaccagcccgaggcagcacaccatctggagcagcgccagcattgccgcgcgggcaggatcgtagtcgtaactcagcgcctgatagattgccagctcgatagtggtcgcctgcggaccgccccccagcgatagcacggtggcgaagctggcgaaacagagcataaagataagcgcagcaaccggcgggatttgtcgccgtaaccacggccattcgacgaagcggaaaaaatgccagctacgcatcccaagctgggcggcaagttgacgctgttcgccggggatgttttccagtgcctggagtaataagcggctcgccatcggcagattaaaaaacacatgggccagcaaaataccttgcaggccgtagggcgaaaaggtccactccagaccgagcgattggcagagtgttgccagccagccctggcgaccatagacgctaagaatgccgaaaacagcgaccaacaccgggaggatcaaggtcattgcacacagacgcaacagcgccagccgacccggaaagcgcctgcgatagagcgcgcgggcgaggaatatcgcgggtatgacagagagcagtgccgagagaaacgcctgccagaaggagaagcgcaccacatgccacagatagctgtcctgccagactgccacccagtcatcctgcggcgcgttccaccacagggcgagaaacgccgccagcgcaaccgctaccaccagcgtggtggcgcttacacctggaattaaccagccgggaattaacggctgacggcgcgttgccattcgctaatccatgcctgacgttgtgccgccacttcggctggcgtgaactccaacgtggttgcgggtttggtcaatttttcaaaaccggcaggcagcgtgacgtttgccaccggatacatccagttgccggttgggatcgcattctggaaagccggagaaaccataaactggaggaatttttgcgccagctccggctgcttgctggcagcggtgcgggcggcgacttccacttgcagatagtgaccttcgctgaagttcgcggcggcgtagttatctttcttctcttcgagaatgtgataagccggagaggtggtgtaactcagtaccagatcgctttcaccttttaaaaacaggccgtaggcttcgctccagcctttggtgaccgtgaccgttttcttcgccagtttctgccaggcttgtggggcgtcatcgccatagactttttgcatccatagcaacagacccagccccggtgtactggtgcgcggatcctgataaatcacccgccagttttgatcgctctcaaccagttctttcaggctttgtggcgggtttttcagtttgttcttgtcataaacgaaggcgaagtagccataatcaaacggtacgaaagtgtcattattccagccgccgggaacgttaacggcatccgctgccacaccgcttttggcaaacagtccggttttactggcggcgtctaacaggttgttatccagccccagcaccacatcggctttactgtttttgccttccatccgtagacggttgagaagcgaaacgccatcttccagcgccaccagtttcagttcgcaattacagtcggcttcaaaggcttttttaaccaccggaccaggcccccagtcggcggcgaaggaatcgtaggtataaacagtcagaacgggtttagcgaaaacgggcgctgtgcacagcaacagcaggggcagacatttttttaacactttgcacctcaaaaaagagtggcaaaggacttgagaaggagcctcaaatcccttcgccggcgttatccggatcaggttcgacgggtattttctcagcgcacgcgtacgcgtggcaccccgttgagaacggcgttagtgtagtgattttgttatcaaccagcaatcatggatccggtggcgcaaaccacgctgatttaaaatcgaaccagccgagggtattcatgcgcaggccgcgcatactgcgttgcccctgaatgatcagccagtggtgcaacaatggcaccatcgctttgctggcgaccagttgctggcaccagttcgccagattcatctcgccattgcgccagcgagcagcgtcggcttgccagtcaatgggaatgcaatgttgtagcagtggcacttcgcataaatgtgcgaaaacagagaagtccagcggcagggtaaagttggcgctgtttagccagatatcactttcgatctctcctgtatgccactgatcgtagtcgatctctttgattttcagcgtgacctggtgacttgccagaatctgctgcatgatcccggcaatcacccgatgctcactgtgatcctgataaaaggttagggtgaggctttccaggccagccggtttttcgctctttatggtgcgggcatggtgccaacgggggagcagtccataagccgggaaccacagttgctggtactgttcctcagcgaaatagaccagattagttggagaaagcacatagcttacccagtccctgacttgctgattcgccccgcgatgggtgcggctgtcgaacagtaaatagtagcaaccttcctccaggcggctttcaatctctttttcctcgccctgtggaccttttagcatcagccctccggctggctcgtcggcaatttccggcagaacccagacgttaacttcgtcgattaatgcccggtaaccgaagaagtcatcgaatgcctgaattttcagttgattggtgctgttgcgaatcaccgcatacggaccggtgccgatgggatggctggcaaagttactgagggtttcccattcgcgcggcaggatcatcgccggaacttgccccagcagtaacggtaaccagcggtccggttgcgtgagatggatatccagcgtccagggcgtcggcgacacaatgtcagcaatatgcgaatagagcggcagcgtattgattcgttttaaagaggcgatcacatcgtccatttccagttcacgaccatggtgaaaatggactcctggacgcaaaaagaaacgccagtgaagcggtgaaatttgctgccagtggtgggcgatgtctgcttccagttccccattttcctcatttatgcgcgttagcgaactgaagatttgccgggcgatatgggtttcggaacggcgcaatgcgctgccaggtagcagattacgcaacggacgatagtagagcacgcgcaggatgtgccgcccctggcggaagctgcggcccagatgagaaaccagcatttgccgcacagtcgctttgtcgccaaccaactgcaccagttgatcgatacgatcctgctccagcaggtcttccgcccgctgttgctgaagcgccagcccggtatagaggaatgtcagacgcgagcgtttaccgcgcccgacttccgcttcccacgtcagccagccgcgatcctgcatggtgttgagcagggtgcgcatatgacgacgcgagcagctcaataacgctgccagttcgttgagcgttgtgtcctgcgatttaccctcgcagcattgccacaggcggatgaactgttgttgcagacgagcagatggcataaaaggggaactcctgtgcaaaagacagcaattttattttccctatattaagtcaataattcctaacgatgaagcaagggggtgccccatgcgtcagttttatcagcactattttaccgcgacagcgaagttgtgctggttgcgttggttaagcgtcccacaacgattaaccatgcttgaaggactgatgcagtgggatgaccgcaattctgaaagttgacttgcctgcatcatgtgtgactgagtattggtgtaaaatcacccgccagcagattatacctgctggttttttttattctcgccgcgctaaaaagggaacgtatgatctggataatgacgatggctcgccgtatgaacggtgtttacgcggcatttatgctggtcgcttttatgatgggggtggccggggcgctacaggctcctacattgagcttatacctgagtcgtgaggttggcgcgcaacctttctggatcggactcttttatacggtgaatgctattgctgggatcggcgtaagcctctggttggcaaaacgttctgacagtcagggcgatcggcgaaaactgattatattttgctgtttgatggctatcggcaatgcgctattgtttgcatttaatcgtcattatctgacgcttatcacctgtggtgtgcttctggcatctctggccaatacggcaatgccacagttatttgctctggcgcgggaatatgcggataactcggcgcgagaagtggtgatgtttagctcggtgatgcgtgcgcagctttctctggcatgggttatcggtccaccgttggcctttatgctggcgttgaattacggctttacggtgatgttttcgattgccgccgggatattcacactcagtctggtattgattgcatttatgcttccgtctgtggcgcgggtagaactgccgtcggaaaatgctttatcaatgcaaggtggctggcaggatagtaacgtacggatgttatttgtcgcctcgacgttaatgtggacctgcaacaccatgtacattattgatatgccgttgtggatcagtagcgagttaggattgccagacaaactggcgggtttcctgatggggacggcagctggtctggaaataccagcaatgattctggctggctactatgtcaaacgttatggtaagcggcgaatgatggtcatagcagtggcggcaggagtactgttttacaccggattgattttatttcatagccgtctggcgttgatgacgctgcaactttttaacgctgtatttatcggcattgttgcgggtattgggatgctatggtttcaggatttaatgcctggaagagcgggggcagctaccaccttatttactaacagtatttctaccggggtaattctggctggcgttattcagggagcaattgcacaaagttgggggcactttgctgtctactgggtaattgcggttatttctgttatcgcattatttttaaccgcaaaggttaaagacgtttgatgacgtggacgatagcggaaagcccggtcatttgaccgggcaaggggattaattcataaacgcaggttgttttgcttcataagcggcaatggcgtcgtcgtgctgcaaggtaagcccaatactgtccagaccgttcatcatgcagtggcggcggaaggcatcgatggtaaagcgataggttttctctcccgctttcacctcttgcgcttccagatccacgtcgaaatggatccccggattggctttcaccagcgcaaacagttcgtccacttctgcatcgcttaatttcaccggcagcagctggttgttaaagctattgccgtagaagatgtcagcaaaactcggcgcaatcaccactttaaaaccgtagtcggtcaatgcccagggcgcgtgctcacgcgaagagccacagccgaagttttctcgtgccagcaaaatggaagcgccctgatactgcgggaagttcagcacgaagtccgggtttggctgttggcctttttcatccagaaaacgccagtcgttaaacagatgcgcgccaaaacccgtacgggtcactttctgcaaaaactgtttcgggatgattgcatcggtatcgacattggcggcatccagcggaaccaccaggcctgtgtgtttgataaatttctctgccatggtgtgctccttatttaatgttgcgaatgtcggcgaaatgtccggtcacagcagcagcggcagccattgccgggctgaccagatgcgtgcgcccgccgcgcccctggcggccttcaaagttacggttgctggtggaggcacaacgttcgcccggattcagacggtcgttgttcatcgccagacacattgagcagccaggcaagcgccattcaaaaccggcttcaataaagattttatccagaccttccgcttccgcctgggcttttaccgggccagagccgggaaccaccagtgcctgcacgcctggcgcgacttttcgccctttggcgatctccgctgccgcgcgtaaatcttcaatgcgcgagttggtacaggaaccgataaacactttgtcgatagccacttcggtcagcggaatacccggtttcagccccatataggccagcgctttttctgccgacgcgcgttcaaccggatcggcaaacgaagccggatcgggaatattgtcgttcacggaaatcacctggccgggattggtgccccaggtgacctgcggtgaaatttcttctgcttgcagagtgacaacggtatcgaaagttgcgccttcgtcggtttgcagggttttccagtaggcaacggcgtcgtcgaaatctttgcctttcggcgcatgcagacggcctttgacatagttaaaggtggtttcgtccggtgcaaccagaccggcttttgcgcccatttcgattgccatattgcacagggtcatacgaccttccatgcttaaatcacggattgcttcgccgcaaaactccaccacatgcccggtgccgcctgcgctaccggttttaccgataattgccagcacgatatcttttgcggtaatgcccggcgcggctttgccctggacttcaattttcatggtttttgcgcggccctgtttcagggtttgcgttgccagtacgtgttcaacttcggaagtgccgataccaaaggccagtgcgccaaacgcgccgtgggtggcggtatgcgagtcgccgcagacaatggtcatccccggcaaggtgacgccctgttccggccccattacgtggacgatcccctgatacgggtgattcaggtcatacagttcgacgccaaattctttgcagtttttgatcagttcctgcatctggatacgcgccatttcaccgcaggcattaatgtctttggtctgggtagagacgttgtgatccatggtagcgaaggttttgcccggctgacgtaccgggcgaccgtgggcgcgcagaccatcgaacgcctgcggtgaggtcacttcatgcaccaggtggcggtcgatatataacagtggggtttcgttttcggcttcgtacacaacgtgagcgtcgaacaatttttcgtataacgtcttagccatgattacaccccttctgctacatagcgggcaatgatatcgcccatttcatcggtactaacggcggcagcgccacgggctaaatccccggtgcgaatgccttcttctaatgcgcggttaatggcgcgttcaatggcgcaagccgcatcatcggcatccaggctgtaacgcagcagcagtgccagcgaaaggatttgtgcaatcgggttggcgatgtttttgcctgcgatatctggtgccgagccgcccgccggttcatacagtccaaaaccttgctcgttcaggctggcggaaggcaacatccccatcgagccagtgatcattgcgcactcgtcagacagaatgtcgccaaacaggttggagcacagcagaacgtcaaactgtgatggatctttaatcagctgcatggtggcgttgtcgatgtacatatgcgccagttcgacatccgggtattccgtggcgatctcgttaacgatctcccgccataaaatagaggattgcagcacgttggctttatcgatcgacgtcactttgtggcgacgcttgcgagcagattcaaacgcgatgcgggcgatacgttcgatctcaaaacggtgatacacctcggtatcaaaggctttttcatattgtccgctaccttcgcggccttttggctgaccgaaatagatgccgccggtcagttcgcgcacacacaggatgtcgaagccgtttgcggcaatgtctgcacgcagcggacagaatgcttccagcccctgatacagttttgccgggcgcaggttgctgaataatttgaagtgcttacgcagaggcagcagcgcgccgcgttctggttgctggtctggtggtaaatgttcccacttcgggccgcctaccgagccaaacagcacggcatcggcttgctcacaaccttcaaccgtcgcaggcggcagtggttgcccgtggttatcaatggctgcgccgcctacatcgtaatggctggtggtgatgcgcatcgcaaagcggttgcgcacggcatccagcactttcagcgcctgggtcatcacttccggaccaataccgtcccccggcaatacggcaatatggtaattcttcgacatcacacggtttccttgttgttttcgttgtgttgagctttgcgttgcaactctttttcgacttctgcggcacgccagatattgttcagaacgtgcaccatggctttggcagatgactcgacaatatcggtagccaggccgacgccgtggaagcggcgaccgttgtagttagcgacgatatccacctgacccagcgcatctttaccgtggcctttggcggtcaggctgtatttcaccagttcgacgttatattcagtgatgcggttaattgcctgatagacggcatcgaccggaccgttaccgttggcggcttctgctttgacttcttcgccacaggccagtttgacggcggcggtggcgatatcgttagagccagactgcacgctgaagtaatccagacggaaatgctccggctcttcttgctgcttaccgatgaaggccagcgcctccagatcgtaatcaaacacctgaccttttttgtccgccagcttcaggaaagcatcgtacaaattgtctaaattatattcactttctttataccccatctcatccatgcgatgtttcaccgccgcacgccccgaacgagaggtcagattcagctggatttggttcagaccaatagattctggtgtcatgatttcgtagttttcgcggtttttcagcacgccatcctggtgtataccggaggagtgtgcgaatgcgccgctgccaacaatggctttgtttgccgggatcggcatattacaaatctggctaactaactggctggtgcgccatatctcctggtgattaatggcggtgtggacgtcgagaatatccttacgaactttgatcgccatgatgacttcttccagggaacagtttccggcacgctcgccgatcccgttcattgcaccttccacctggcgtgcaccggcatgtaccgccgccagtgagttgccgaccgccaggcctaaatcgtcgtgggtatgtacggaaataatggctttgtcgatgttaggtacgcgttcatacaggccgctgatgattccggcgaactcaaacggcatggtgtagcccacggtgtccggaatgttgatggtggtggcaccggcattaatcgccgcttcgaccactcgcgccagatcggcaatgggtgtacgcccggcatcttcgcaagaaaattcaacatcatcggtgtaattacgggcgcgtttcaccatatagatagcgcgttcgatcacttcatccagcgtgctgcgcagcttggtggcgatgtgcattggcgaagtggcaataaaggtatgaatacggaaggcttcggcgactttcagggattcggccgccacgtcgatatctttctccacgcagcgagctaacgcgcatacgcggctgtttttaacctggcgggcgatggtttgcactgattcaaaatcacccggcgaagagacggggaaaccgacttccatcacgtcaacacccatacgctcaagggccagcgcaatttgcagtttttctttcacactcaagcttgcctgtaacgcctgttcaccgtcgcgcaatgtggtatcgaaaataatgacttgctggctcatggtttgggtccttgtctcttttagagcgcctcgcttcgggcataaaaaaacccgcgcaatggcgcgggttttttgtttgactgcgtgctggcttaatgctggatgccgctcactcgtctaccgcgcaaagaagatgcgtttagtagtagtagaccgataaagcgaacgatgtgagtcattaaatcagctccagatgaatgcgatatgcttttagagttactggatacaaaaacggatgtcaaccctgacgcaataaaaacgtcccgccagcgtgagttctgcatccgtaaaattagctaattgtgctgcggtggttaaagtaagcgatattaatttctgcttaactaccgacgcttttcatcggttgacatatttcagcataaatttttgcatctaatcaacgaggaaaaaggggacaaaatgcacgcgttgcaaaacctatcctaatgatttgtattgaattatatgttttgcgattttttttgatattgatttggtgaatattattgatcaattaatgttaagaattaatgcattaaatatataaattaattattaaataagcacatttaattcattttgtagatgattgagtattcgcggtagttatgattagattgttttcgcaacaaaatcattatggattattatgctgtggtaaatgactcattccacggcaatggattctgtttttatcagaacccgtatctttatgttttcctaattttactcattttcctttttcttattttatatgcatgataaatcatattcttcaggattatttctctgcattccaataagggaaagggagttaagtgtgacagtggagttaagtatgccagaggtacaaacagatcattcagagacggcggagttaagcaagccacagctacgcatggtcgatctcaacttattaaccgttttcgatgccgtgatgcaggagcaaaacattacccgtgccgctcatgttctgggtatgtcgcaacctgcggtcagtaacgctgttgcacgcctgaaggtgatgtttaatgacgagctttttgttcgttatggccgtggtattcaaccgactgctcgcgcatttcaactttttggttcagttcgccaggcattgcaactagtacaaaatgaattgcctggttcaggttttgaacccgcgagtagtgaacgtgtatttcatctttgtgtttgcagcccgttagacagcattctgacctcgcagatttataatcacattgagcagattgcgccaaatatacatgttatgttcaagtcttcattaaatcagaacactgaacatcagctgcgttatcaggaaacggagtttgtgattagttatgaagacttccatcgtcctgaatttaccagcgtaccattatttaaagatgaaatggtgctggtagccagcaaaaatcatccaacaattaagggcccgttactgaaacatgatgtttataacgaacaacatgcggcggtttcgctcgatcgtttcgcgtcatttagtcaaccttggtatgacacggtagataagcaagccagtatcgcgtatcagggcatggcaatgatgagcgtacttagcgtggtgtcgcaaacgcatttggtcgctattgcgccgcgttggctggctgaagagttcgctgaatccttagaattacaggtattaccgctgctgttaaaacaaaacagcagaacctgttatctctcctggcatgaagctgccgggcgcgataaaggccatcaggggatggaagagcaattagtctcaatttgcaaacgctaactgattgcagaataggtcagacatgaatgtctggtttattctgcattttttattgaatgtagaattttattctgaatgtgtgggctctctattttaggattaattaaaaaaatagagaaattgctgtaagttgtgggattcagccgatttattatcaatttaatcctctgtaatggaggattttatcgtttcttttcacctttcctcctgtttattcttattaccccgtgtttatgtctctggctgccaattgcttaagcaagatcggacggttaatgtgttttacacattttttccgtcaaacagtgaggcaggccatggagatgttgtctggagccgagatggtcgtccgatcgcttatcgatcagggcgttaaacaagtattcggttatcccggaggcgcagtccttgatatttatgatgcattgcataccgtgggtggtattgatcatgtattagttcgtcatgagcaggcggcggtgcatatggccgatggcctggcgcgcgcgaccggggaagtcggcgtcgtgctggtaacgtcgggtccaggggcgaccaatgcgattactggcatcgccaccgcttatatggattccattccattagttgtcctttccgggcaggtagcgacctcgttgataggttacgatgcctttcaggagtgcgacatggtggggatttcgcgaccggtggttaaacacagttttctggttaagcaaacggaagacattccgcaggtgctgaaaaaggctttctggctggcggcaagtggtcgcccaggaccagtagtcgttgatttaccgaaagatattcttaatccggcgaacaaattaccctatgtctggccggagtcggtcagtatgcgttcttacaatcccactactaccggacataaagggcaaattaagcgtgctctgcaaacgctggtagcggcaaaaaaaccggttgtctacgtaggcggtggggcaatcacggcgggctgccatcagcagttgaaagaaacggtggaggcgttgaatctgcccgttgtttgctcattgatggggctgggggcgtttccggcaacgcatcgtcaggcactgggcatgctgggaatgcacggtacctacgaagccaatatgacgatgcataacgcggatgtgattttcgccgtcggggtacgatttgatgaccgaacgacgaacaatctggcaaagtactgcccaaatgccactgttctgcatatcgatattgatcctacttccatttctaaaaccgtgactgcggatatcccgattgtgggggatgctcgccaggtcctcgaacaaatgcttgaactcttgtcgcaagaatccgcccatcaaccactggatgagatccgcgactggtggcagcaaattgaacagtggcgcgctcgtcagtgcctgaaatatgacactcacagtgaaaagattaaaccgcaggcggtgatcgagactctttggcggttgacgaagggagacgcttacgtgacgtccgatgtcgggcagcaccagatgtttgctgcactttattatccattcgacaaaccgcgtcgctggatcaattccggtggcctcggcacgatgggttttggtttacctgcggcactgggcgtcaaaatggcgttgccagaagaaaccgtggtttgcgtcactggcgacggcagtattcagatgaacatccaggaactgtctaccgcgttgcaatacgagttgcccgtactggtggtgaatctcaataaccgctatctggggatggtgaagcagtggcaggacatgatctattccggccgtcattcacaatcttatatgcaatcgctacccgatttcgtccgtctggcggaagcctatgggcatgtcgggatccagatttctcatccgcatgagctggaaagcaaacttagcgaggcgctggaacaggtgcgcaataatcgcctggtgtttgttgatgttaccgtcgatggcagcgagcacgtctacccgatgcagattcgcgggggcggaatggatgaaatgtggttaagcaaaacggagagaacctgattatgcgccggatattatcagtcttactcgaaaatgaatcaggcgcgttatcccgcgtgattggccttttttcccagcgtggctacaacattgaaagcctgaccgttgcgccaaccgacgatccgacattatcgcgtatgaccatccagaccgtgggcgatgaaaaagtacttgagcagatcgaaaagcaattacacaaactggtcgatgtcttgcgcgtgagtgagttggggcagggcgcgcatgttgagcgggaaatcatgctggtgaaaattcaggccagcggttacgggcgtgacgaagtgaaacgtaatacggaaatattccgtgggcaaattatcgatgtcacaccctcgctttataccgttcaattagcaggcaccagcggtaagcttgatgcatttttagcatcgattcgcgatgtggcgaaaattgtggaggttgctcgctctggtgtggtcggactttcgcgcggcgataaaataatgcgttgagaatgatctcaatgcgcaatttacagcccaacatgtcacgttgggctttttttgcgaaatcagtgggaacctggaataaaagcagttgccgcagttaattttctgcgcttagatgttaatgaatttaacccataccagtacaatggctatggtttttacattttacgcaaggggcaattgtgaaactggatgaaatcgctcggctggcgggagtgtcgcggaccactgcaagctatgttattaacggcaaagcgaagcaataccgtgtgagcgacaaaaccgttgaaaaagtcatggctgtggtgcgtgagcacaattaccacccgaacgccgtggcagctgggcttcgtgctggacgcacacgttctattggtcttgtgatccccgatctggagaacaccagctatacccgcatcgctaactatcttgaacgccaggcgcggcaacggggttatcaactgctgattgcctgctcagaagatcagccagacaacgaaatgcggtgcattgagcaccttttacagcgtcaggttgatgccattattgtttcgacgtcgttgcctcctgagcatcctttttatcaacgctgggctaacgacccgttcccgattgtcgcgctggaccgcgccctcgatcgtgaacacttcaccagcgtggttggtgccgatcaggatgatgccgaaatgctggcggaagagttacgtaagtttcccgccgagacggtgctttatcttggtgcgctaccggagctttctgtcagcttcctgcgtgaacaaggtttccgtactgcctggaaagatgatccgcgcgaagtgcatttcctgtatgccaacagctatgagcgggaggcggctgcccagttattcgaaaaatggctggaaacgcatccgatgccgcaggcgctgttcacaacgtcgtttgcgttgttgcaaggagtgatggatgtcacgctgcgtcgcgacggcaaactgccttctgacctggcaattgccacctttggcgataacgaactgctcgacttcttacagtgtccggtgctggcagtggctcaacgtcaccgcgatgtcgcagagcgtgtgctggagattgtcctggcaagcctggacgaaccgcgtaagccaaaacctggtttaacgcgcattaaacgtaatctctatcgccgcggcgtgctcagccgtagctaagccgcgaacaaaaatacgcgccaggtgaatttccctctggcgcgtagagtacgggaatggacatcaatatccttaaagtaaataagactattcctgactattattgataagttcttttaaacccgcccgttaattaactcaccagctgaaattcacaataattaagtgatatcgacagcgcgtttttgcattattttgttacatgcagagatgaattgccgatttaacaagcacttttctttgcttttgcgcaaacccgctggcatcaagcgccacacagacgcaacagggactgttaaccggggaagatatgtcctaaaatgccgctcgcgtcgcaaactgacactttatatttgctgtggaaaatagtgagtcattttaaaacggtgatgacgatgagggattttttcttacagctattcataacgttaatttgctgcgcacgttggacgtaaaataaacaacgctgatattagccgtaaacatcgggttttttacctcggtatgccttgtgactggcttgacaagcttttcctccgctccgtaaactcctttcagtgggaaattgtggggcaaagtgggaataaggggtgaggctggcatgttccggggagcaacgttagtcaatctcgacagcaaagggcgcttatcagtgcctacccgttaccgggaacagctgcttgagaacgctgccggtcaaatggtttgcaccattgacattcatcacccgtgcctgctgctttaccccctgcctgaatgggaaattatcgagcaaaaattatcgcgtctgtcgagcatgaacccggttgagcgccgtgtgcagcgcctactgttaggtcatgccagcgaatgtcagatggatggcgcaggtcgattgttaatcgcgccagtactgcggcaacatgccgggctgacaaaagaagtgatgctggttggacagttcaacaagtttgagctgtgggatgaaacaacctggcatcaacaggtcaaggaagatatcgacgcagagcagttggctaccggagacttatcggagcgactgcaggacttgtctctataaaatgatggaaaactataaacatactacggtgctgttggatgaagccgttaatggcctcaatatccgtcctgatggcatctacattgatgggacttttggtcgcggtggtcactcacgtctgatcctctcgcagcttggcgaagaggggcgtttgctggcgatcgatcgcgacccgcaggctatcgccgttgcgaagactattgatgatccgcgcttctccatcatccacggacctttttccgcgctgggcgaatacgttgccgagcgcgatcttatcggcaagatcgacggcattctcctcgatcttggcgtctcttcaccgcaacttgatgatgctgagcgcggcttttcctttatgcgcgatggtccgctggacatgcgtatggacccaacccgtgggcagtcagccgctgaatggctacaaaccgcagaagaagccgatatcgcctgggtattgaaaacctatggtgaagagcgttttgccaaacgcattgcccgcgccattgtcgagcgtaaccgcgaacagccgatgacccgcaccaaagaactggcggaagtcgtggctgctgcaacgccggtgaaagataagtttaaacatcccgcgacccgtaccttccaggcggtgcgcatttgggtaaacagtgaactggaggagatagagcaggcgctaaaaagctcgctcaacgtgctggccccgggtgggcggctttcgatcatcagcttccactcgctggaagaccgtattgtgaaacgttttatgcgtgaaaacagccgcggtccgcaagttccggcagggttaccgatgactgaagagcagctcaaaaaactgggtggccgtcagctgcgagcactaggcaagttaatgccgggcgaagaagaggtggctgagaaccctcgtgcccgtagttcagttctgcgtattgcagagaggacgaatgcatgatcagcagagtgacagaagctctaagcaaagttaaaggatcgatgggaagccacgagcgccatgcattgcctggtgttatcggtgacgatcttttgcgatttgggaagctgccactctgcctgttcatttgcattattttgacggcggtgactgtggtaaccacggcgcaccatacccgtttactgaccgctcagcgcgaacaactggtgctggagcgagatgctttagacattgaatggcgcaacctgatccttgaagagaatgcgctcggcgaccatagccgggtggaaaggatcgccacggaaaagctgcaaatgcagcatgttgatccgtcacaagaaaatatcgtagtgcaaaaataaggataaacgcgacgcatgaaagcagcggcgaaaacgcagaaaccaaaacgtcaggaagaacatgccaactttatcagttggcgttttgcgttgttatgcggctgtattctcctggcgctggcttttctgctcggacgcgtagcgtggttacaagttatctccccggatatgctggtgaaagagggcgacatgcgttctcttcgcgttcagcaagtttccacctcccgcggcatgattactgaccgttctggtcgcccgttagcggtgagcgtgccggtaaaagcgatttgggctgacccgaaagaagtgcatgacgctggcggtatcagcgtcggtgaccgctggaaggcgctggctaacgcgctcaatattccgctggatcagctttcagcccgcattaacgccaacccgaaagggcgctttatttatctggcgcgtcaggtgaaccctgacatggcggactacatcaaaaaactgaaactgccggggattcatctgcgtgaagagtctcgccgttactatccgtccggcgaagtgactgctcacctcatcggctttactaacgtcgatagtcaagggattgagggcgttgagaagagtttcgataaatggcttaccgggcagccgggtgagcgcattgtgcgtaaagaccgctatggtcgcgtaattgaagatatttcttctactgacagccaggcagcgcacaacctggcgctgagtattgatgaacgcctgcaggcgctggtttatcgcgaactgaacaacgcggtggcctttaacaaggctgaatctggtagcgccgtgctggtggatgtcaacaccggtgaagtgctggcgatggctaacagcccgtcatacaaccctaacaatctgagcggcacgccgaaagaggcgatgcgtaaccgtaccatcaccgacgtgtttgaaccgggctcaacggttaaaccgatggtggtaatgaccgcgttgcaacgtggcgtggtgcgggaaaactcggtactcaataccattccttatcgaattaacggccacgaaatcaaagacgtggcacgctacagcgaattaaccctgaccggggtattacagaagtcgagtaacgtcggtgtttccaagctggcgttagcgatgccgtcctcagcgttagtagatacttactcacgttttggactgggaaaagcgaccaatttggggttggtcggagaacgcagtggcttatatcctcaaaaacaacggtggtctgacatagagagggccaccttctctttcggctacgggctaatggtaacaccgttacagttagcgcgagtctacgcaactatcggcagctacggcatttatcgcccactgtcgattaccaaagttgaccccccggttcccggtgaacgtgtcttcccggaatccattgtccgcactgtggtgcatatgatggaaagcgtggcgctaccaggcggcggcggcgtgaaggcggcgattaaaggctatcgtatcgccattaaaaccggtaccgcgaaaaaggtcgggccggacggtcgctacatcaataaatatattgcttataccgcaggcgttgcgcctgcgagtcagccgcgcttcgcgctggttgttgttatcaacgatccgcaggcgggtaaatactacggcggcgccgtttccgcgccggtctttggtgccatcatgggcggcgtattgcgtaccatgaacatcgagccggatgcgctgacaacgggcgataaaaatgaatttgtgattaatcaaggcgaggggacaggtggcagatcgtaatttgcgcgaccttcttgctccgtgggtgccagacgcaccttcgcgagcactgcgagagatgacactcgacagccgtgtggctgcggcgggcgatctctttgtagctgtagtaggtcatcaggcggacgggcgtcgatatatcccgcaggcgatagcgcaaggtgtggctgccattattgcagaggcgaaagatgaggcgaccgatggtgaaatccgtgaaatgcacggcgtaccggtcatctatctcagccagctcaacgagcgtttatctgcactggcgggccgcttttaccatgaaccctctgacaatttacgtctcgtgggcgtaacgggcaccaacggcaaaaccacgactacccagctgttggcgcagtggagccaactgcttggcgaaaccagcgcggtaatgggcaccgttggtaacggcctgctggggaaagtgatcccgacagaaaatacaaccggttcggcagtcgatgttcagcatgagctggcggggctggtggatcagggcgcgacgttttgcgcaatggaagtttcctcccacgggctggtacagcaccgtgtggcggcattgaaatttgcggcgtcggtctttaccaacttaagccgcgatcatcttgattatcatggtgatatggaacactacgaagccgcgaaatggctgctttattctgagcatcattgcggtcaggcgattattaacgccgacgatgaagtgggccgccgctggctggcaaaactgccggacgcggttgcggtatcaatggaagatcatattaatccgaactgtcacggacgctggttgaaagcgaccgaagtgaactatcacgacagcggtgcgacgattcgctttagctcaagttggggcgatggcgaaattgaaagccatctgatgggcgcttttaacgtcagcaacctgctgctcgcgctggcgacactgttggcactcggctatccactggctgatctgctgaaaaccgccgcgcgtctgcaaccggtttgcggacgtatggaagtgttcactgcgccaggcaaaccgacggtggtggtggattacgcgcatacgccggatgcactggaaaaagccttacaggcggcgcgtctgcactgtgcgggcaagctgtggtgtgtctttggctgtggtggcgatcgcgataaaggtaagcgtccactgatgggcgcaattgccgaagagtttgctgacgtggcggtggtgacggacgataacccgcgtaccgaagaaccgcgtgccatcatcaacgatattctggcgggaatgttagatgccggacatgccaaagtgatggaaggccgtgctgaagcggtgacttgcgccgttatgcaggctaaagagaatgatgtggtactggtcgcgggcaaaggccatgaagattaccagattgttggcaatcagcgtctggactactccgatcgcgtcacggtggcgcgtctgctgggggtgattgcatgattagcgtaacccttagccaacttaccgacattctcaacggtgaactgcaaggtgcagatatcacccttgatgctgtaaccactgatacccgaaaactgacgccgggctgcctgtttgttgccctgaaaggcgaacgttttgatgcccacgattttgccgaccaggcgaaagctggcggcgcaggcgcactactggttagccgtccgctggacatcgacctgccgcagttaatcgtcaaggatacgcgtctggcgtttggtgaactggctgcatgggttcgccagcaagttccggcgcgcgtggttgctctgacggggtcctccggcaaaacctccgttaaagagatgacggcggcgattttaagccagtgcggcaacacgctttatacggcaggcaatctcaacaacgacatcggtgtaccgatgacgctgttgcgcttaacgccggaatacgattacgcagttattgaacttggcgcgaaccatcagggcgaaatagcctggactgtgagtctgactcgcccggaagctgcgctggtcaacaacctggcagcggcgcatctggaaggttttggctcgcttgcgggtgtcgcgaaagcgaaaggtgaaatctttagcggcctgccggaaaacggtatcgccattatgaacgccgacaacaacgactggctgaactggcagagcgtaattggctcacgcaaagtgtggcgtttctcacccaatgccgccaacagcgatttcaccgccaccaatatccatgtgacctcgcacggtacggaatttaccctacaaaccccaaccggtagcgtcgatgttctgctgccgttgccggggcgtcacaatattgcgaatgctctggcagccgctgcgctctccatgtccgtgggcgcaacgcttgatgctatcaaagcggggctggcaaatctgaaagctgttccaggccgtctgttccccatccaactggcagaaaaccagttgctgctcgacgactcctacaacgccaatgtcggttcaatgactgcagcagtccaggtactggctgaaatgccgggctaccgcgtgctggtggtgggcgatatggcggaactgggcgctgaaagcgaagcctgccatgtacaggtgggcgaggcggcaaaagctgctggtattgaccgcgtgttaagcgtgggtaaacaaagccatgctatcagcaccgccagcggcgttggcgaacattttgctgataaaactgcgttaattacgcgtcttaaatcactgattgctgagcaacaggtaattacgattttagttaagggttcacgtagtgccgccatggaagaggtagtacgcgctttacaggagaatgggacatgttagtttggctggccgaacatttggtcaaatattattccggctttaacgtcttttcctatctgacgtttcgcgccatcgtcagcctgctgaccgcgctgttcatctcattgtggatgggcccgcgtatgattgctcatttgcaaaaactttcctttggtcaggtggtgcgtaacgacggtcctgaatcacacttcagcaagcgcggtacgccgaccatgggcgggattatgatcctgacggcgattgtgatctccgtactgctgtgggcttacccgtccaatccgtacgtctggtgcgtgttggtggtgctggtaggttacggtgttattggctttgttgatgattatcgcaaagtggtgcgtaaagacaccaaagggttgatcgctcgttggaagtatttctggatgtcggtcattgcgctgggtgtcgccttcgccctgtaccttgccggcaaagacacgcccgcaacgcagctggtggtcccattctttaaagatgtgatgccgcagctggggctgttctacattctgctggcttacttcgtcattgtgggtactggcaacgcggtaaacctgaccgatggtctcgacggcctggcaattatgccgaccgtatttgtcgccggtggttttgcgctggtggcgtgggcgaccggcaatatgaactttgccagctacttgcatataccgtatctgcgacacgccggggaactggttattgtctgtaccgcgatagtcggggcaggactgggcttcctgtggtttaacacctatccggcgcaggtctttatgggcgatgtaggttcgctggcgttaggtggtgcgttaggcattatcgccgtactgctacgtcaggaattcctgctggtgattatggggggcgtgttcgtggtagaaacgctttctgtcatcctgcaggtcggctcctttaaactgcgcggacaacgtattttccgcatggcaccgattcatcaccactatgaactgaaaggctggccggaaccgcgcgtcattgtgcgtttctggattatttcgctgatgctggttctgattggtctggcaacgctgaaggtacgttaatcatggctgattatcagggtaaaaatgtcgtcattatcggcctgggcctcaccgggctttcctgcgtggactttttcctcgctcgcggtgtgacgccgcgcgttatggatacgcgtatgacaccgcctggcctggataaattacccgaagccgtagaacgccacacgggcagtctgaatgatgaatggctgatggcggcagatctgattgtcgccagtcccggtattgcactggcgcatccatccttaagcgctgccgctgatgccggaatcgaaatcgttggcgatatcgagctgttctgtcgcgaagcacaagcaccgattgtggcgattaccggttctaacggcaaaagcacggtcaccacgctagtgggtgaaatggcgaaagcggcgggggttaacgttggtgtgggtggcaatattggcctgcctgcgttgatgctactggatgatgagtgtgaactgtacgtgctggaactgtcgagcttccagctggaaaccacctccagcttacaggcggtagcagcgaccattctgaacgtgactgaagatcatatggatcgctatccgtttggtttacaacagtatcgtgcagcaaaactgcgcatttacgaaaacgcgaaagtttgcgtggttaatgctgatgatgccttaacaatgccgattcgcggtgcggatgaacgctgcgtcagctttggcgtcaacatgggtgactatcacctgaatcatcagcagggcgaaacctggctgcgggttaaaggcgagaaagtgctgaatgtgaaagagatgaaactttccgggcagcataactacaccaatgcgctggcggcgctggcgctggcagatgctgcagggttaccgcgtgccagcagcctgaaagcgttaaccacattcactggtctgccgcatcgctttgaagttgtgctggagcataacggcgtacgttggattaacgattcgaaagcgaccaacgtcggcagtacggaagcggcgctgaatggcctgcacgtagacggcacactgcatttgttgctgggtggcgatggtaaatcggcggactttagcccactggcgcgttacctgaatggcgataacgtacgtctgtattgtttcggtcgtgacggcgcgcagctggcggcgctacgcccggaagtggcagaacaaaccgaaactatggaacaggcgatgcgcttgctggctccgcgtgttcagccgggcgatatggttctgctctccccagcctgtgccagccttgatcagttcaagaactttgaacaacgaggcaatgagtttgcccgtctggcgaaggagttaggttgatgcgtttatctctccctcgcctgaaaatgccgcgcctgccaggattcagtatcctggtctggatctccacggcgctaaagggctgggtgatgggctcgcgggaaaaagataccgacagcctgatcatgtacgatcgcaccttactgtggctgaccttcggcctcgcggcgattggctttatcatggtgacctcggcgtcaatgcccatagggcaacgcttaaccaacgatccgttcttcttcgcgaagcgtgatggtgtctatctgattttggcgtttattctggcgatcattacgctgcgtctgccgatggagttctggcaacgctacagtgccacgatgctgctcggatctatcatcctgctgatgatcgtcctggtagtgggtagctcggttaaaggggcatcgcgttggatcgatctcggtttgctgcgtatccagcctgcggagctgacaaaactgtcgctgttttgctatatcgccaactatctggtgcgtaaaggcgacgaagtacgtaataacctgcgcggcttcctgaaaccgatgggcgtgattctggtgttggcagtgttactgctggcacagccagaccttggtacggtggtggtgttgtttgtgactacgctggcgatgttgttcctggcgggagcgaaattgtggcagttcattgccattatcggtatgggcatttcagcggttgtgttgctgatactcgccgaaccgtaccgtatccgccgtgttaccgcattctggaacccgtgggaagatccctttggcagcggctatcagttaacgcaatcgctgatggcgtttggtcgcggcgaactttgggggcaaggtttaggtaactcggtacaaaaactggagtatctgccggaagcgcacactgactttattttcgccattatcggcgaagaactggggtatgtcggtgtggtgctggcacttttaatggtattcttcgtcgcttttcgcgcgatgtcgattggccgtaaagcattagaaattgaccaccgtttttccggttttctcgcctgttctattggcatctggtttagcttccaggcgctggttaacgtaggcgcggcggcggggatgttaccgaccaaaggtctgacattgccgctgatcagttacggtggttcgagcttactgattatgtcgacagccatcatgatgctgttgcgtattgattatgaaacgcgtctggagaaagcgcaggcgtttgtacgaggttcacgatgagtggtcaaggaaagcgattaatggtgatggcaggcggaaccggtggacatgtattcccgggactggcggttgcgcaccatctaatggctcagggttggcaagttcgctggctggggactgccgaccgtatggaagcggacttagtgccaaaacatggcatcgaaattgatttcattcgtatctctggtctgcgtggaaaaggtataaaagcactgatagctgccccgctgcgtatcttcaacgcctggcgtcaggcgcgggcgattatgaaagcgtacaaacctgacgtggtgctcggtatgggaggctacgtgtcaggtccaggtggtctggccgcgtggtcgttaggcattccggttgtacttcatgaacaaaacggtattgcgggcttaaccaataaatggctggcgaagattgccaccaaagtgatgcaggcgtttccaggtgctttccctaatgcggaagtagtgggtaacccggtgcgtaccgatgtgttggcgctgccgttgccgcagcaacgtttggctggacgtgaaggtccggttcgtgtgctggtagtgggtggttctcagggcgcacgcattcttaaccagacaatgccgcaggttgctgcgaaactgggtgattcagtcactatctggcatcagagcggcaaaggttcgcaacaatccgttgaacaggcgtatgccgaagcggggcaaccgcagcataaagtgacggaatttattgatgatatggcggcggcgtatgcgtgggcggatgtcgtcgtttgccgctccggtgcgttaacggtgagtgaaatcgccgcggcaggactaccggcgttgtttgtgccgtttcaacataaagaccgccagcaatactggaatgcgctaccgctggaaaaagcgggcgcagccaaaattatcgagcagccacagcttagcgtggatgctgtcgccaacaccctggccgggtggtcgcgagaaaccttattaaccatggcagaacgcgcccgcgctgcatccattccggatgccaccgagcgagtggcaaatgaagtgagccgggttgcccgggcgtaattgtagcgatgccttttgcatcgtatgaatttaagaagttaatggcgtaaagaatgaatacacaacaattggcaaaactgcgttccatcgtgcccgaaatgcgtcgcgttcggcacatacattttgtcggcattggtggtgccggtatgggcggtattgccgaagttctggccaatgaaggttatcagatcagtggttccgatttagcgccaaatccggtcacgcagcagttaatgaatctgggtgcgacgatttatttcaaccatcgcccggaaaacgtacgtgatgccagcgtggtcgttgtttccagcgcgatttctgccgataacccggaaattgtcgccgctcatgaagcgcgtattccggtgatccgtcgtgccgaaatgctggctgagttaatgcgttttcgtcatggcatcgccattgccggaacgcacggcaaaacgacaaccaccgcgatggtttccagcatctacgcagaagcggggctcgacccaaccttcgttaacggcgggctggtaaaagcggcgggggttcatgcgcgtttggggcatggtcggtacctgattgccgaagcagatgagagtgatgcatcgttcctgcatctgcaaccgatggtggcgattgtcaccaatatcgaagccgaccacatggatacctaccagggcgactttgagaatttaaaacagacttttattaattttctgcacaacctgccgttttacggtcgtgcggtgatgtgtgttgatgatccggtgatccgcgaattgttaccgcgagtggggcgtcagaccacgacttacggcttcagcgaagatgccgacgtgcgtgtagaagattatcagcagattggcccgcaggggcactttacgctgctgcgccaggacaaagagccgatgcgcgtcaccctgaatgcgccaggtcgtcataacgcgctgaacgccgcagctgcggttgcggttgctacggaagagggcattgacgacgaggctattttgcgggcgcttgaaagcttccaggggactggtcgccgttttgatttcctcggtgaattcccgctggagccagtgaatggtaaaagcggtacggcaatgctggtcgatgactacggccaccacccgacggaagtggacgccaccattaaagcggcgcgcgcaggctggccggataaaaacctggtaatgctgtttcagccgcaccgttttacccgtacgcgcgacctgtatgatgatttcgccaatgtgctgacgcaggttgataccctgttgatgctggaagtgtatccggctggcgaagcgccaattccgggagcggacagccgttcgctgtgtcgcacaattcgtggacgtgggaaaattgatcccattctggtgccggaccctgcgcaggtagccgagatgctggcaccggtattaaccggtaacgacctgattctcgttcagggggctggtaatatcggaaaaattgcccgttctttagctgaaatcaaactgaagccgcaaactccggaggaagaacaacatgactgataaaatcgcggtcctgttgggcgggacttccgctgagcgggaagtttctctgaattctggcgcagcggtgttagccgggctgcgtgaaggcggtattgatgcgtatcctgtcgacccgaaagaagtcgacgtgacgcaactgaagtcgatgggttttcagaaagtgtttatcgcgctacacggtcgcggcggtgaagatggtacgctgcagggcatgctcgagctgatgggcttgccttataccggcagcggagtgatggcatctgcgctttcaatggataaactacgcagcaaactgctgtggcaaggtgccggtttaccggtcgcgccgtgggtagcgttaacccgcgcagagtttgaaaaaggcctgagcgataagcagttagcagaaatttctgctctgggtttgccggttatcgttaagccgagccgcgaaggttccagtgtgggaatgtcaaaagtagtagcagaaaatgctctacaagatgcattaagattggcatttcagcacgatgaagaagtattgattgaaaaatggctaagtgggccggagttcacggttgcgatactcggtgaagaaattttaccgtcaatacgtattcaaccgtccggaaccttctatgattatgaggcgaagtatctctctgatgagacacagtatttctgccccgcaggtctggaagcgtcacaagaggccaatttgcaggcattagtgctgaaagcatggacgacgttaggttgcaaaggatggggacgtattgacgttatgctggacagcgatggacagttttatctgctggaagccaatacctcaccgggtatgaccagccacagcctggtgccgatggcggcacgtcaggcaggtatgagcttctcgcagttggtagtacgaattctggaactggcggactaatatgtcgcaggctgctctgaacacgcgaaatagcgaagaagaggtttcttctcgccgcaataatggaacgcgtctggcggggatccttttcctgctgaccgttttaacgacagtgttggtgagcggctgggtcgtgttgggctggatggaagatgcgcaacgcctgccgctctcaaagctggtgttgaccggtgaacgccattacacgcgtaatgacgatatccggcagtcgatcctggcattgggtgagccgggtacctttatgacccaggatgtcaacatcatccagacgcaaatagaacaacgcctgccgtggattaagcaggtgagcgtcagaaagcagtggcctgatgaattgaagattcatctggttgaatatgtgccgattgcgcggtggaatgatcaacacatggtagacgcggaaggaaacaccttcagcgtgccgccagatcgcaccagcaagcaggtgcttccaatgctgtatggcccggaaggcagcgctaatgaagtgttgcagggctatcgcgaaatggggcagatgctggcaaaggacagatttactctgaaggaagcggcgatgaccgcgcggcgttcctggcagttgacgctgaataacgatattaagctcaatcttggccggggcgatacgatgaaacgtttggctcgctttgtagaactttatccggttttacagcagcaggcgcaaaccgatggcaaacggattagctacgttgatttgcgttatgactctggagcggcagtaggctgggcgcccttgccgccagaggaatctactcagcaacaaaatcaggcacaggcagaacaacaatgatcaaggcgacggacagaaaactggtagtaggactggagattggtaccgcgaaggttgccgctttagtaggggaagttctgcccgacggtatggtcaatatcattggcgtgggcagctgcccgtcgcgtggtatggataaaggcggggtgaacgacctcgaatccgtggtcaagtgcgtacagcgcgccattgaccaggcagaattgatggcagattgtcagatctcttcggtatatctggcgctttctggtaagcatatcagctgccagaatgaaattggtatggtgcctatttctgaagaagaagtaacgcaagaagatgtggaaaacgtcgtccataccgcgaaatcggtgcgtgtgcgcgatgagcatcgtgtgctgcatgtgatcccgcaagagtatgcgattgactatcaggaagggatcaagaatccggtaggactttcgggcgtgcggatgcaggcaaaagtgcacctgatcacatgtcacaacgatatggcgaaaaacatcgtcaaagcggttgaacgttgtgggctgaaagttgaccaactgatatttgccggactggcatcaagttattcggtattgacggaagatgaacgtgaactgggtgtctgcgtcgtcgatatcggtggtggtacaatggatatcgccgtttataccggtggggcattgcgccacactaaggtaattccttatgctggcaatgtcgtgaccagtgatatcgcttacgcctttggcacgccgccaagcgacgccgaagcgattaaagttcgccacggttgtgcgctgggttccatcgttggaaaagatgagagcgtggaagtgccgagcgtaggtggtcgtccgccacggagtctgcaacgtcagacactggcagaggtgatcgagccgcgctataccgagctgctcaacctggtcaacgaagagatattgcagttgcaggaaaagcttcgccaacaaggggttaaacatcacctggcggcaggcattgtattaaccggtggcgcagcgcagatcgaaggtcttgcagcctgtgctcagcgcgtgtttcatacgcaagtgcgtatcggcgcgccgctgaacattaccggtttaacggattatgctcaggagccgtattattcgacggcggtgggattgcttcactatgggaaagagtcacatcttaacggtgaagctgaagtagaaaaacgtgttacagcatcagttggctcgtggatcaagcgactcaatagttggctgcgaaaagagttttaatttttatgaggccgacgatgattacggcctcaggcgacaggcacaaatcggagagaaactatgtttgaaccaatggaacttaccaatgacgcggtgattaaagtcatcggcgtcggcggcggcggcggtaatgctgttgaacacatggtgcgcgagcgcattgaaggtgttgaattcttcgcggtaaataccgatgcacaagcgctgcgtaaaacagcggttggacagacgattcaaatcggtagcggtatcaccaaaggactgggcgctggcgctaatccagaagttggccgcaatgcggctgatgaggatcgcgatgcattgcgtgcggcgctggaaggtgcagacatggtctttattgctgcgggtatgggtggtggtaccggtacaggtgcagcaccagtcgtcgctgaagtggcaaaagatttgggtatcctgaccgttgctgtcgtcactaagcctttcaactttgaaggcaagaagcgtatggcattcgcggagcaggggatcactgaactgtccaagcatgtggactctctgatcactatcccgaacgacaaactgctgaaagttctgggccgcggtatctccctgctggatgcgtttggcgcagcgaacgatgtactgaaaggcgctgtgcaaggtatcgctgaactgattactcgtccgggtttgatgaacgtggactttgcagacgtacgcaccgtaatgtctgagatgggctacgcaatgatgggttctggcgtggcgagcggtgaagaccgtgcggaagaagctgctgaaatggctatctcttctccgctgctggaagatatcgacctgtctggcgcgcgcggcgtgctggttaacatcacggcgggcttcgacctgcgtctggatgagttcgaaacggtaggtaacaccatccgtgcatttgcttccgacaacgcgactgtggttatcggtacttctcttgacccggatatgaatgacgagctgcgcgtaaccgttgttgcgacaggtatcggcatggacaaacgtcctgaaatcactctggtgaccaataagcaggttcagcagccagtgatggatcgctaccagcagcatgggatggctccgctgacccaggagcagaagccggttgctaaagtcgtgaatgacaatgcgccgcaaactgcgaaagagccggattatctggatatcccagcattcctgcgtaagcaagctgattaagaattgactggaatttgggtttcgaggctctttgtgctaaactggcccgccgaatgtatagtacacttcggttggataggtaatttggcgagataatacgatgatcaaacaaaggacacttaaacgtatcgttcaggcgacgggtgtcggtttacataccggcaagaaagtcaccctgacgttacgccctgcgccggccaacaccggggtcatctatcgtcgcaccgacttgaatccaccggtagatttcccggccgatgccaaatctgtgcgtgataccatgctctgtacgtgtctggtcaacgagcatgatgtacggatttcaaccgtagagcacctcaatgctgctctcgcgggcctgggcatcgataacattgttatcgaagttaacgcgccggaaatcccgatcatggacggcagcgccgctccgtttgtatacctgctgcttgacgccggtatcgacgagttgaactgcgccaagaaatttgttcgcatcaaagagactgttcgtgtcgaagatggcgataagtgggctgaatttaagccgtacaatggtttttcgctggatttcaccatcgattttaaccatccggctattgattccagcaaccagcgctatgcgatgaacttctccgctgatgcgtttatgcgccagatcagccgtgcgcgtacgttcggtttcatgcgtgatatcgaatatctgcagtcccgtggtttgtgcctgggcggcagcttcgattgtgccatcgttgttgacgattatcgcgtactgaacgaagacggcctgcgttttgaagacgaatttgtgcgtcacaaaatgctcgatgcgatcggtgacttgttcatgtgtggtcacaatattattggtgcatttaccgcttataaatccggtcatgcactgaataacaaactgctgcaggctgtcctggcgaaacaggaagcctgggaatatgtgaccttccaggacgacgcagaactgccgttggccttcaaagcgccttcagccgtactggcataacgacatttatactgtcgtataaaattcgactggcaaatctggcactctctccggccaggtgaaccagtcgtttttttttgaattttataagagctataaaaaacggtgcgaacgctgttttcttaagcacttttacgcacaacttatcttcattcgtgctgtggacttcaggctttaatgataagatttgtgcgctaaatacgtttgaatacgatcgggatggcaataacgtgagtggaatactgacgcgctggcgacagtttggtaaacgctacttctggccgcatctcttattagggatggttgcggcgagtttaggtttgcctgcgctcagcaacgccgccgaaccaaacgcgcccgcaaaagcgacaacccgcaaccacgagccttcagccaaagttaactttggtcaattggccttgctggaagcgaacacgcgccgcccgaattcgaactattccgttgattactggcatcaacatgctattcgcacggtaatccgtcatctttctttcgcaatggcaccgcaaacgctgcccgttgctgaagaatctttgcctcttcaggcgcaacatcttgcattactggatacgctcagcgcgctgctgacccaggaaggcacgccgtctgaaaagggttatcgcattgattatgcgcattttaccccacaagcaaaattcagcacgcccgtctggataagccaggcgcaaggcatccgtgctggccctcaacgcctctgctaacaacaataaacctttacttcattttattaactccgcaacgcggggcgtttgagattttattatgctaatcaaattattaactaaagttttcggtagtcgtaacgatcgcaccctgcgccggatgcgcaaagtggtcaacatcatcaatgccatggaaccggagatggaaaaactctccgacgaagaactgaaagggaaaaccgcagagtttcgtgcgcgtctggaaaaaggcgaagtgctggaaaatctgatcccggaagctttcgccgtggtacgtgaggcaagtaagcgcgtctttggtatgcgtcacttcgacgttcagttactcggcggtatggttcttaacgaacgctgcatcgccgaaatgcgtaccggtgaaggtaaaaccctgaccgcaacgctgcctgcttacctgaacgcactaaccggtaaaggcgtgcatgtagttaccgtcaacgactacctggcgcaacgtgacgccgaaaacaaccgtccgctgtttgaattccttggcctgactgttggtatcaacctgccgggcatgccagcaccggcaaagcgtgaagcttatgcagctgacatcacttacggtacgaacaacgaatacggctttgactacctgcgcgacaacatggcgttcagccctgaagaacgtgtacagcgtaaactgcactatgcgctggtggacgaagtggactccatcctgatcgatgaagcgcgtacaccgctgatcatttccggcccggcagaagacagctcggaaatgtataaacgcgtgaataaaattattccgcacctgatccgtcaggaaaaagaagactccgaaaccttccagggcgaaggccacttctcggtggacgaaaaatctcgccaggtgaacctgaccgaacgtggtctggtgctgattgaagaactgctggtgaaagagggcatcatggatgaaggggagtctctgtactctccggccaacatcatgctgatgcaccacgtaacggcggcgctgcgcgctcatgcgctgtttacccgtgacgtcgactacatcgttaaagatggtgaagttatcatcgttgacgaacacaccggtcgtaccatgcagggccgtcgctggtccgatggtctgcaccaggctgtggaagcgaaagaaggtgtgcagatccagaacgaaaaccaaacgctggcttcgatcaccttccagaactacttccgtctgtatgaaaaactggcggggatgaccggtactgctgataccgaagctttcgaatttagctccatctacaaactggataccgtcgttgttccgaccaaccgtccaatgattcgtaaagatctgccggacctggtctacatgactgaagcggaaaaaattcaggcgatcattgaagatatcaaagaacgtactgcgaaaggccagccggtgctggtgggtactatctccatcgaaaaatcggagctggtgtcaaacgaactgaccaaagccggtattaagcacaatgtcctgaacgccaaattccacgccaacgaagcggcgattgttgctcaggcaggttatccggctgcggtgactatcgcgaccaacatggcgggtcgtggtacagatattgtgctcggtggtagctggcaggcagaagttgccgcgctggaaaatccgaccgcagagcaaattgaaaaaattaaagccgactggcaggtacgtcacgatgcggtactggcagcaggtggcctgcatatcatcggtaccgagcgtcacgaatcccgtcgtatcgataaccagttgcgcggtcgttctggtcgtcagggggatgctggttcttcccgtttctacctgtcgatggaagatgcgctgatgcgtatttttgcttccgaccgagtatccggcatgatgcgtaaactgggtatgaagccaggcgaagccattgaacacccgtgggtgaccaaagcgattgccaacgcccagcgtaaagttgaaagtcgtaacttcgacattcgtaagcaactgctggaatatgatgacgtggctaacgatcagcgtcgcgccatttactcccagcgtaacgaactgctggatgtcagcgatgtgagcgaaaccatcaacagcattcgtgaagatgtgttcaaagccaccattgatgcctacattccgccgcagtcgctggaagaaatgtgggatattccggggctgcaggaacgtctgaagaacgatttcgacctcgatttaccaattgctgagtggctggataaagaacccgaactgcatgaagagacgctgcgtgagcgcattctggcgcagtccatcgaagtgtatcagcgtaaagaagaagtggttggtgcagagatgatgcgtcacttcgagaaaggcgtcatgctgcaaacgcttgactccctgtggaaagagcacctggcagcgatggactatctgcgtcagggtatccacctgcgaggctatgcacagaaagatccgaagcaggaatacaaacgtgaatcgttctccatgtttgcagcgatgctggagtcgttgaaatatgaagttatcagtacgctgagcaaagttcaggtacgtatgcctgaagaggttgaggagctggaacaacagcgtcgtatggaagccgagcgtttagcgcaaatgcagcagcttagccatcaggatgacgactctgcagccgcagctgcactggcggcgcaaaccggtgaacgcaaagtaggacgtaacgatccttgcccgtgcggttctggtaaaaaatacaagcagtgccatggtcgcctgcaataaaagctaacagttgaagtaaaaggcgcaggattctgcgccttttttataggtttaagacaatgaaaaagctgcaaattgcggtaggtattattcgcaacgagaacaatgaaatctttataacgcgtcgcgcagcagatgcgcacatggcgaataaactggagtttcccggcggtaaaattgaaatgggtgaaacgccggaacaggcggtggtgcgtgaacttcaggaagaagtcgggattaccccacaacatttttcgctatttgaaaaactggaatatgaattcccggacaggcatataacactgtggttctggctggtcgaacgctgggaagggaagccgtggggtaaagaagggcaacccggtgagtggatggcgctggtcgatcttaatgccgatgattttccgccagccaatgaaccggtaattgcgaagcttaaacgtctgtaggtcagataaggcgttttcgccgcatccgacattcgcacacgatgcctgatgcgacgctggcgcgtcttatcaggcctacagggatttctaactcattgataaatttgtttttgtaggtcggataaggcgttcacgccgcatccgacatttgcacaagatgcctgatgcgacgctgtccgcgtcttatcaggcctacgtgcggcatcagacaaatgtcactgctttggttcttcgctccagtcatcgctttcggaaagatcgccactgctggggattcgtttttcttcagcagcccattctccgaggtcgatcagctgacaacgtttggagcaaaatggccgaaacgggctgatttcaccccacaccaccgttttcccgcaggttgggcaattcaccgtaatagtttctgacatttttactccttagcaacaggccagttcgaaatccagacgttccggtacctgtccgttttcactgtccagcggcataaaacgaatggcaaaacggctcttatgtccggaaatttgcggataaagctgtgaatcgagcgacagattcaggcgcagcaagtcggcatcgccaccgttatcctgataaaaaccattcaggctggtttgtttacggaagggggccgactggcgaattaaatccagcaccatggtaagtgcctgggtgagcgggttcaggctggcaatccaggtttctacctggctgtcgcgctgcgcctggggtagatgcagccaaatgtgcaatgttggtaaatcaaagctgcaacagccgcctgggatgctcagtcgctgacgcaccagagcaatcaaacgatcttcacgcagaaattgcccgatacgcggcgcggaaattaatacgctccccgccgcctttaactgctgaattaatgcttcaatacggctctggtccacgccaggcacgccaatccaggtctggagtttacgttgctgccggtcaagttctttcaacagctcagtgcggacttcgccgcgctcgaaaacatccagtaattcactgacattacggaagaaatgcagcgcgccagcgtggtcagcgatgggtaaattaacggtgagttgctgaatcaaaaactcaatgcgcagccatgtacgcattttttcatttagtggatgttcaaaaaggacctgggtctgcattacggtttttcctgtgagacaaactgcgacgcaagctgcaaatagtgtgcgtgcaggcgggcaacatccgatgcgatagcatccggtgcgccgttattatcaatgacgtcatctgccacggcaaggcgggcttcgcgcgttgcctgagcagcaaggatttgttcgacatgctcgcgagttacatcatcgcgctgcatggtgcgcttaagttgcgtttctgggctgacatccaccacaagcactcgattcgcttttttatacagtgagttttctaccagcaatggcacaacccacagtacatagggggaagtagcttgctggatctggtgttgcgtctcttgctgaatcagcggatgcagcagggcgttaagccagtttttctcttccgggttggcgaagatccgctcgcgcaaggcccggcgctgcaatgttccatcagcagcaatcatgttagcgccaaagtgatcagcaatggcatgtagcgcaggtgcacctggttcaaccacctgacgcgcaataatatcggcatcaatgacgttaattccgagatcagcaaacgcattggcaacggtactcttgccactgccaatacctcccgttaaggcaactatatacctcataatttatattcccgggaattcatcatgattatcaaaacgttaaaaatgagtgcacgaaagcgaaattgatgaaacgttcgctcactatttaccaggtaaatttatgggattgtagcgtaaaaaaagacaatttcgcagtcttgcgccgcattgattagtgcgtatgatagcgtcactggagttgcgctcttacccttatagccattaaccccaggaatccgcacatgcgtattgaagaagatctgaagttaggttttaaagacgttctcatccgccctaaacgctccactcttaaaagccgttccgatgttgaactggaacgtcaattcaccttcaaacattcaggtcagagctggtccggcgtgccgattatcgccgcaaatatggacaccgtaggcacattttctatggcctctgcgctggcttcttttgatattttgactgctgtgcataaacactattctgtcgaagagtggcaagcgtttatcaacaattcttccgctgatgtgctgaaacatgtgatggtttctaccggtacgtctgatgcggatttcgaaaaaactaaacagattctcgacctgaacccggcattaaacttcgtttgtattgacgtggcgaatggttattccgaacacttcgtgcagttcgttgcgaaagcgcgtgaagcgtggccgaccaaaaccatttgtgctggtaacgtagtgactggtgaaatgtgtgaggagcttatcctctcaggtgccgatatcgttaaagttggcattggcccaggttctgtttgtacaactcgcgtcaaaacaggcgtcggttatccgcaactttctgcggtaatcgaatgtgccgatgctgcgcacggtctgggcggaatgatcgtcagcgatggtggctgcaccacgccgggcgatgtggcgaaagcctttggcggcggtgccgatttcgtcatgcttggcggcatgctggcgggccacgaagagagcggcggtcgcatcgttgaggagaacggcgagaaatttatgctgttctacggcatgagctccgagtctgcgatgaaacgtcacgttggcggcgttgcggaatatcgcgcagcagaaggtaaaaccgttaagctgccgctgcgaggcccggttgaaaataccgcgcgagatattttgggcggcctgcgttcagcttgtacatacgttggggcttcacgcctgaaagagctgaccaagcgcaccacgtttattcgtgtgcaggaacaagaaaaccgcatcttcaacaacctgtaatctcccaacgctggcgtggagcaacacgccagcgttatcccatcccactcatcgcatcgcctaaatggaaaattggcagatacattgccaccaccagcgtaccaataattcctcccgttatgatcagcaacgccggttccagtaaggctgcgaggttatccgccagcgccattgtgttttcccgatgatgatgggcgaggttgtctaacatgagatccagagagccggatgcctctcctgttctcactaattgcaaacagagcgggctaaactcaccggtattttttagcgccagccagatgggttgaccgttactgatatcgtgctggatttgtgtcagaagttgcacccagtacgggcagcgcattgtttctctgacgctctctacgccctgtaaaaaagtaatgcctgcactttgtgtcagcgccagaatcgtaaagatctgcgtgagtttttgtccccgcatcagtgaacccataatcgggatgcgtaacagcaatttctgccgcactataagccaggtcggtcggcgcatcagcaacttattggctatcgccagcagaaagccgaacaacaccagcagccagctccattcgccactaaagtctgccagcgtcatgatcccctgcgttagtgccggtagtggggtgttgaaggtcttatagatagcggcaaactccggcagaacaaaatgcagcattgccacaaccaccatgattgccatcgctaaaatgatgatgggataacgtaacgctgatttcactttgtcggtcaactgacgctgggctttttgctgacgcgccagttcaaagcagcattcatccagcttaccggtcagttcacccgtgcggatcatcgcctgatagagcggcggaaatacctctgaccagggtaataaggcattggaaaaagcaatgccctgttcgagatcgtgcgccagcgattgcagcaacgcttgccattgcttactgggatgctgttccgccagcagagccagcccttcagaaagcgttaaccctgctttgagtagcgtcgccagttgatgaatgacttccgcgcttttatctcctcgccactgcgcagaattgatggcgattcgcttcaggcttagtggggtaaccatctgttgctgtagtgccataagcagtaaagtacggctctctgcccatagcatcccatcttgcgcattgccgtcgccggttatgccatgccagcgccagagttgcttactcgccatgcggcatccccagtacgcggattaactcttcaaaggtggttaagccttgctctacggccaggcagccgttttcaaaaagcgtacgcatacccgcctgtcgtgcgtgcgtttccagcgattcaacgtcggtattagcggaaataagctgacgaatgaccggcgttatgggcagaacttcaaataaggccgtacgaccataaaaaccgtggtagcaatgtacacaaccgggtgcctgccagtggggcagcggcgatggccatacattgtctggaatgtggatgggctccccttgctgccggcgacaatgtgggcaaagtttgcgtaccagacgctgggctattaccagcgtaagcgccgatgatagcatccagcgggcgacccccatttgctgtaaacgtaccagcgtttcgcaggtggaattagtgtgtagggtagacaacaccaggtgaccagtttgcgccgctttaatagcgatctctgctgtttcgccatcgcggatctctccgatcatgatgacgtcaggatcctggcgcaataacgcacgcaaaacgccctgaaaggtgagtccggcacgcggatggatttgcgtctggtttagtccggctatggggatctcaactggatcttcgacgctacaaatattaatgtcagcggtattcagcttttgcagggcactataaagcgtgaccgttttgccgctgccggtagggccagttaccagcaccagtccctgtggttgttgcaaggcatgagcaaagtccgccagttgtaacggctgcattccaagcgtgttgacatccagtgcctgacccacctgctgtaacaaccttaataccaccttttcaccaccccgacatggtaaggtcgcaatacgaaatgagacggcgtttcctgccagttcgacagtgaattgcccgtcctgcggcaggcgatgttccgcaatatccaggtttcccagcacttttaatctggcggttaatgcgactccggcatccggtgaaacatccggtaaaggatgcaatacgccgtcgatacgcaagcggatgcggtaggcattgtccgctggttcgatatgaatatcagacgcgcgttgttccagcgcagattgtaacgttcgagttagcaactctgctttgggctgatgcttctcctgaacagctacgggcaatgtctgttgtgtgcgactggcgtgaccttccatttgttggcgcgtccagcaggtgatctcaatacgtttggtggtagcgaaatgcaatgcgtccagtagctcatgcgaaggtgcatcgactaccgcaacatgaaccacctcttcgctggcatccagcaagactccatgataacgcagacacagggcagtgagctgtggaatattcattgccgctccttagttggcgtcatcaaagcggaagacatcttcgcaggcttgctgcaatgcgctgtcactttgaatattgcagttgcgcgtccagccggtgacgccgtttgcgttatcccaacccggtgtcatgacgacgcttagcccattgagactttcttgcccggtcagcgacaccacgccctttgccacactcatggctgaaacatagcgggtggtggtaggcgagggaatgccattgctgccaccgtcgcaggtatctaatccaccatgttccagcgcgcacaactctacggcggtacggtaaggcacaaaggtttgtagcatgtcggtgagtgcggctttgcgcaggtagttttgataagcgggaataccaatggcgcttaaaatggcaatgatgccaataaccaccatcagttcgataagtgtaaaaccgcgttgcttgtccatctgtttcgctccttgatttggttggcgctactttggcaaacgccatcagcacaggcgaggggcaaaaaacgaaacgggaaagcagattccgaggttttttatttcgttgcagcgaaagacaagaaatttgcgaggcgttacgaagaaagttggggaaggggagattatccgcccgcgatggagcggataaatctgtcaactattagcgaaaacgcattgaaaggtcgagtgcttgtacgtgtttagttagcgcaccgacggagataaagtccacgcccgtttcggcaaattcacgcagtgttttgtcagtgacgttgccagacacttccagtagcgccttgccgttggtgcgtttgacggcttcgcgcatctgttctgtttcgaagttatccagcatgatgatatcggctcctgctttcagggcttcatcaagttcttccagattctctacttcgacttctactggcgcatccgggtgcagccaggacgctttttcgaccgcctggcgcactgagccggaggcaataatatggttttctttgatcaggaaggcatcagaaagccccagacggtgattcgctccgccgccgcaaagtaccgcgtatttcagagctgaacgcaggccgggtaaggttttgcgcgtatccaacaactgcgtgttggtgccttccagcaattcgacatagtggcgtaccttactggcaactcctgaaagggtttgcacaaaattaagcgcagtgcgttcgcccgttaacagcacgcgggatgggccttcaagttcgaacaaggattgattggcattgatgacatcgccgtcatccacatgccagattatggtgacatcgtcgcctgccagttgaataaacacctcttcaacccagcgtttgccgcaaaagacgccattctcgcgggtgatcaccgtggcatgagagcgagaattttccggtaaaagttttgccgtaatatcattgttggcatcgactgttccgcctaaatcttcccgcagcgcctgggccaccgcgccggggatatcgagattaatgcgttccagcagctcgtcacgtcgggtgtcagggttatagcggcgaggcggcatgttaaaactccagatagctaacgaatcataaggtagaaacatgctactctgaaccgggtattagcaccacatataaggagatcctgcatgttgttagaacaggggtggctggttggcgcgcgccgcgttccctcaccacattacgattgccgcccggatgacgaaacacccaccctgctggtggtgcacaatattagcctgccgccaggcgagtttggcggtccgtggatcgacgcattattcactggaactattgatccgcaggcacatcctttctttgctgagatcgcccatttgcgcgtctccgctcactgtttgattcgccgtgatggtgaaatagtccagtatgttcctttcgataaacgtgcatggcatgcgggagtctctcagtatcaggggcgcgaacgctgcaatgatttttctattgggattgagcttgaaggcaccgatacgctggcgtataccgatgcgcagtatcaacagcttgcggcggttacgcgggcactgattgattgctatccggatatcgctaaaaacatgacgggccattgtgatattgcgccggatcggaaaaccgatcccggtcctgcatttgattgggcacggtttcgtgtgctggtcagcaaggagacaacatgacgctatttacaaccttactggtgttaattttcgagcgcctgtttaagttgggcgagcactggcagcttgatcatcgtcttgaagcgttctttcggcgggtgaaacatttttctctcgggcgcacgttaggcatgaccattattgcgatgggcgtgacttttttactgttacgcgcattgcagggagtattgttcaacgttcccacgctactggtgtggctgctgattggtttgctgtgtattggcgcaggtaaagttcgtcttcattatcatgcttatctgacagctgcttcacgtaatgatagccatgcccgtgccacgatggctggcgaactcaccatgattcacggcgtcccggcaggctgcgacgaacgtgagtatttgcgtgagctgcaaaatgcattgctgtggattaactttcgtttttatcttgcaccgctgttctggctgattgtggggggaacctggggacccgttacgctgatggggtatgcgtttttgcgtgcatggcaatactggctggcgcgatatcagacgccgcatcatcgtttacagtccggcattgatgccgtgcttcatgtactggattgggtgccggttcgtcttgcgggtgtggtatatgccttgatcggtcatggtgagaaagcgttaccggcctggtttgcttcgctgggtgatttccatacttcgcagtatcaggtgttaacgcgtctggcgcagttctctctggcgcgtgaaccgcatgtcgataaggtggagacgccgaaggcagcggtttcaatggcgaagaaaacctcgttcgtggtcgtggtggtgattgcactactgacgatttacggggcgttggtgtaaagattattgccctcaccctgtacgggtgagggcgtagagagattaatgcgcttttacggctttggcggttttctctttaaacagatagccgatacctaacacgatcagccataccgggatcaggtataccgaaatcgccattcctggggtcatcagcataatcaccagtaccgccgccataaacagcaggcagatccagttacccagcggataaagcagagcagggaagcgagttaccacgccttgttcctgcttggcgcgacggaatttcatatgcgccaggctaatcatcgcccagttgattaccagtgcagataccaccagcgccattaacagtccgaaagcggactctggggcaaggtagttaatcagtacgcacaacgccgttaccagtgcagacaccagaatggtatttactggtacaccacgtttatcgacagacgccagcgcttttggcgcattaccctgttgtgccagaccaaacagcatacggctgttgcaatatacgcagctgttgtacacggagagcgccgcagtcagtaccacgatgttcagcgcattcgccacaaaggtatcgcctaactcgtggaagatcagcacaaacggactggtatcggcggtaacgcgggtccacggcatcagtgagagcagaacggctaacgaaccaatatagaaaatcaggatgcggtagataacctggttagttgctttcggtatactttgctccgggttatcagcttctgctgcggtgatccccaccagttccagaccaccgaacgagaacatgataatcgccatcatcatcaccagcccggtgaagccgtgcggcaggaaaccaccctgatcccacaggttgctaacggtcgcctgcgggccgccgttgccactgaatagcagccagccgccgaagatgatcatcgctaccaccgcgataactttgataatggcaaaccagaactccatctcgccaaacactttaacgttggtcaggttgatggcgttaatcaccacaaagaatacggcggcagaaacccaggtggggatttccggataccagaactgaatgtatttacccacggcagtcagctcagccatggcaactaaaacgtacagtacccagtagttccagccagaggcgaaaccggcaaaactgccccagtatttataagcaaagtggctaaaggagcctgcgacaggttcttcgaccaccatttcacccagctgacgcatgatcagaaaggcgataaaaccagcaatggcgtaacccaggataatccctggccctgcggactgtattacggaggcgctacccaggaataacccggtccctatcgcgccacccagcgcgataagctgaatatggcggtttttaaggccgcgctttagctgctcgccgtgctgttgaccttccatcatgaaacctcgtgcggtggttgtttttttgatctacgcagtgatgcgtgtgtaagtttgcaattccgtttgttgtattaatttatttacatcaaagaagtttgaattgttacaaaaagacttccgtcagatcaagaataatggtatgcggcagcgaatgcacccgctttatgcatggttgaagatgagttgcttaaaaagaaaccgtttgtaaagctcagcctcaacccctctcaatatgtagaatgaatttaaattcgttttaattgaattaaaaatcacaaaattggtaagtgaatcggttcaattcggatttttatagtttaataatcgttaaaaaactcctttcctacgtaaagtctacatttgtgcatagttacaactttgaaacgttatatatgtcaagttgttaaaatgtgcacagtttcatgatttcaatcaaaacctgtatggacataaggtgaatactttgttactttagcgtcacagacatgaaattggtaagaccaattgacttcggcaagtggcttaagacaggaactcatggcctacagcaaaatccgccaaccaaaactctccgatgtgattgagcagcaactggagtttttgatcctcgaaggcactctccgcccgggcgaaaaactcccaccggaacgcgaactggcaaaacagtttgacgtctcccgtccctccttgcgtgaggcgattcaacgtctcgaagcgaagggcttgttgcttcgtcgccagggtggcggcacttttgtccagagcagcctatggcaaagcttcagcgatccgctggtggagctgctctccgaccatcctgagtcacagtatgacttgctcgaaacacgacacgccctggaaggtatcgccgcttattacgccgcgctgcgtagtaccgatgaagacaaggaacgcatccgtgaactccaccacgccatagagctggcgcagcagtctggcgatctggacgcggaatcaaacgccgtactccagtatcagattgccgtcaccgaagcggcccacaatgtggttctgcttcatctgctaaggtgtatggagccgatgttggcccagaatgtccgccagaacttcgaattgctctattcgcgtcgcgagatgctgccgctggtgagtagtcaccgcacccgcatatttgaagcgattatggccggtaagccggaagaagcgcgcgaagcatcgcatcgccatctggcctttatcgaagaaattttgctcgacagaagtcgtgaagagagccgccgtgagcgttctctgcgtcgtctggagcaacgaaagaattagtgatttttctggtaaaaattatccagaagatgttgtaaatcaagcgcatataaaagcgcggcaactaaacgtagaacctgtcttattgagctttccggcgagagttcaatgggacaggttccagaaaactcaacgttattagatagataaggaataacccatgtcagaacgtttcccaaatgacgtggatccgatcgaaactcgcgactggctccaggcgatcgaatcggtcatccgtgaagaaggtgttgagcgtgctcagtatctgatcgaccaactgcttgctgaagcccgcaaaggcggtgtaaacgtagccgcaggcacaggtatcagcaactacatcaacaccatccccgttgaagaacaaccggagtatccgggtaatctggaactggaacgccgtattcgttcagctatccgctggaacgccatcatgacggtgctgcgtgcgtcgaaaaaagacctcgaactgggcggccatatggcgtccttccagtcttccgcaaccatttatgatgtgtgctttaaccacttcttccgtgcacgcaacgagcaggatggcggcgacctggtttacttccagggccacatctccccgggcgtgtacgctcgtgctttcctggaaggtcgtctgactcaggagcagctggataacttccgtcaggaagttcacggcaatggcctctcttcctatccgcacccgaaactgatgccggaattctggcagttcccgaccgtatctatgggtctgggtccgattggtgctatttaccaggctaaattcctgaaatatctggaacaccgtggcctgaaagatacctctaaacaaaccgtttacgcgttcctcggtgacggtgaaatggacgaaccggaatccaaaggtgcgatcaccatcgctacccgtgaaaaactggataacctggtcttcgttatcaactgtaacctgcagcgtcttgacggcccggtcaccggtaacggcaagatcatcaacgaactggaaggcatcttcgaaggtgctggctggaacgtgatcaaagtgatgtggggtagccgttgggatgaactgctgcgtaaggataccagcggtaaactgatccagctgatgaacgaaaccgttgacggcgactaccagaccttcaaatcgaaagatggtgcgtacgttcgtgaacacttcttcggtaaatatcctgaaaccgcagcactggttgcagactggactgacgagcagatctgggcactgaaccgtggtggtcacgatccgaagaaaatctacgctgcattcaagaaagcgcaggaaaccaaaggcaaagcgacagtaatccttgctcataccattaaaggttacggcatgggcgacgcggctgaaggtaaaaacatcgcgcaccaggttaagaaaatgaacatggacggtgtgcgtcatatccgcgaccgtttcaatgtgccggtgtctgatgcagatatcgaaaaactgccgtacatcaccttcccggaaggttctgaagagcatacctatctgcacgctcagcgtcagaaactgcacggttatctgccaagccgtcagccgaacttcaccgagaagcttgagctgccgagcctgcaagacttcggcgcgctgttggaagagcagagcaaagagatctctaccactatcgctttcgttcgtgctctgaacgtgatgctgaagaacaagtcgatcaaagatcgtctggtaccgatcatcgccgacgaagcgcgtactttcggtatggaaggtctgttccgtcagattggtatttacagcccgaacggtcagcagtacaccccgcaggaccgcgagcaggttgcttactataaagaagacgagaaaggtcagattctgcaggaagggatcaacgagctgggcgcaggttgttcctggctggcagcggcgacctcttacagcaccaacaatctgccgatgatcccgttctacatctattactcgatgttcggcttccagcgtattggcgatctgtgctgggcggctggcgaccagcaagcgcgtggcttcctgatcggcggtacttccggtcgtaccaccctgaacggcgaaggtctgcagcacgaagatggtcacagccacattcagtcgctgactatcccgaactgtatctcttacgacccggcttacgcttacgaagttgctgtcatcatgcatgacggtctggagcgtatgtacggtgaaaaacaagagaacgtttactactacatcactacgctgaacgaaaactaccacatgccggcaatgccggaaggtgctgaggaaggtatccgtaaaggtatctacaaactcgaaactattgaaggtagcaaaggtaaagttcagctgctcggctccggttctatcctgcgtcacgtccgtgaagcagctgagatcctggcgaaagattacggcgtaggttctgacgtttatagcgtgacctccttcaccgagctggcgcgtgatggtcaggattgtgaacgctggaacatgctgcacccgctggaaactccgcgcgttccgtatatcgctcaggtgatgaacgacgctccggcagtggcatctaccgactatatgaaactgttcgctgagcaggtccgtacttacgtaccggctgacgactaccgcgtactgggtactgatggcttcggtcgttccgacagccgtgagaacctgcgtcaccacttcgaagttgatgcttcttatgtcgtggttgcggcgctgggcgaactggctaaacgtggcgaaatcgataagaaagtggttgctgacgcaatcgccaaattcaacatcgatgcagataaagttaacccgcgtctggcgtaagaggtaaaagaataatggctatcgaaatcaaagtaccggacatcggggctgatgaagttgaaatcaccgagatcctggtcaaagtgggcgacaaagttgaagccgaacagtcgctgatcaccgtagaaggcgacaaagcctctatggaagttccgtctccgcaggcgggtatcgttaaagagatcaaagtctctgttggcgataaaacccagaccggcgcactgattatgattttcgattccgccgacggtgcagcagacgctgcacctgctcaggcagaagagaagaaagaagcagctccggcagcagcaccagcggctgcggcggcaaaagacgttaacgttccggatatcggcagcgacgaagttgaagtgaccgaaatcctggtgaaagttggcgataaagttgaagctgaacagtcgctgatcaccgtagaaggcgacaaggcttctatggaagttccggctccgtttgctggcaccgtgaaagagatcaaagtgaacgtgggtgacaaagtgtctaccggctcgctgattatggtcttcgaagtcgcgggtgaagcaggcgcggcagctccggccgctaaacaggaagcagctccggcagcggcccctgcaccagcggctggcgtgaaagaagttaacgttccggatatcggcggtgacgaagttgaagtgactgaagtgatggtgaaagtgggcgacaaagttgccgctgaacagtcactgatcaccgtagaaggcgacaaagcttctatggaagttccggcgccgtttgcaggcgtcgtgaaggaactgaaagtcaacgttggcgataaagtgaaaactggctcgctgattatgatcttcgaagttgaaggcgcagcgcctgcggcagctcctgcgaaacaggaagcggcagcgccggcaccggcagcaaaagctgaagccccggcagcagcaccagctgcgaaagcggaaggcaaatctgaatttgctgaaaacgacgcttatgttcacgcgactccgctgatccgccgtctggcacgcgagtttggtgttaaccttgcgaaagtgaagggcactggccgtaaaggtcgtatcctgcgcgaagacgttcaggcttacgtgaaagaagctatcaaacgtgcagaagcagctccggcagcgactggcggtggtatccctggcatgctgccgtggccgaaggtggacttcagcaagtttggtgaaatcgaagaagtggaactgggccgcatccagaaaatctctggtgcgaacctgagccgtaactgggtaatgatcccgcatgttactcacttcgacaaaaccgatatcaccgagttggaagcgttccgtaaacagcagaacgaagaagcggcgaaacgtaagctggatgtgaagatcaccccggttgtcttcatcatgaaagccgttgctgcagctcttgagcagatgcctcgcttcaatagttcgctgtcggaagacggtcagcgtctgaccctgaagaaatacatcaacatcggtgtggcggtggataccccgaacggtctggttgttccggtattcaaagacgtcaacaagaaaggcatcatcgagctgtctcgcgagctgatgactatttctaagaaagcgcgtgacggtaagctgactgcgggcgaaatgcagggcggttgcttcaccatctccagcatcggcggcctgggtactacccacttcgcgccgattgtgaacgcgccggaagtggctatcctcggcgtttccaagtccgcgatggagccggtgtggaatggtaaagagttcgtgccgcgtctgatgctgccgatttctctctccttcgaccaccgcgtgatcgacggtgctgatggtgcccgtttcattaccatcattaacaacacgctgtctgacattcgccgtctggtgatgtaagtaaaagagccggcccaacggccggcttttttctggtaatctcatgaatgtattgaggttattagcgaatagacaaatcggttgccgtttgttgtttaaaaattgttaacaattttgtaaaataccgacggatagaacgacccggtggtggttagggtattacttcacataccctatggatttctgggtgcagcaaggtagcaagcgccagaatccccaggagcttacataagtaagtgactggggtgagggcgtgaagctaacgccgctgcggcctgaaagacgacgggtatgaccgccggagataaatatatagaggtcatgatgagtactgaaatcaaaactcaggtcgtggtacttggggcaggccccgcaggttactccgctgccttccgttgcgctgatttaggtctggaaaccgtaatcgtagaacgttacaacacccttggcggtgtttgcctgaacgtcggctgtatcccttctaaagcactgctgcacgtagcaaaagttatcgaagaagccaaagcgctggctgaacacggtatcgtcttcggcgaaccgaaaaccgatatcgacaagattcgtacctggaaagagaaagtgatcaatcagctgaccggtggtctggctggtatggcgaaaggccgcaaagtcaaagtggtcaacggtctgggtaaattcaccggggctaacaccctggaagttgaaggtgagaacggcaaaaccgtgatcaacttcgacaacgcgatcattgcagcgggttctcgcccgatccaactgccgtttattccgcatgaagatccgcgtatctgggactccactgacgcgctggaactgaaagaagtaccagaacgcctgctggtaatgggtggcggtatcatcggtctggaaatgggcaccgtttaccacgcgctgggttcacagattgacgtggttgaaatgttcgaccaggttatcccggcagctgacaaagacatcgttaaagtcttcaccaagcgtatcagcaagaaattcaacctgatgctggaaaccaaagttaccgccgttgaagcgaaagaagacggcatttatgtgacgatggaaggcaaaaaagcacccgctgaaccgcagcgttacgacgccgtgctggtagcgattggtcgtgtgccgaacggtaaaaacctcgacgcaggcaaagcaggcgtggaagttgacgaccgtggtttcatccgcgttgacaaacagctgcgtaccaacgtaccgcacatctttgctatcggcgatatcgtcggtcaaccgatgctggcacacaaaggtgttcacgaaggtcacgttgccgctgaagttatcgccggtaagaaacactacttcgatccgaaagttatcccgtccatcgcctataccgaaccagaagttgcatgggtgggtctgactgagaaagaagcgaaagagaaaggcatcagctatgaaaccgccaccttcccgtgggctgcttctggtcgtgctatcgcttccgactgcgcagacggtatgaccaagctgattttcgacaaagaatctcaccgtgtgatcggtggtgcgattgtcggtactaacggcggcgagctgctgggtgaaatcggcctggcaatcgaaatgggttgtgatgctgaagacatcgcactgaccatccacgcgcacccgactctgcacgagtctgtgggcctggcggcagaagtgttcgaaggtagcattaccgacctgccgaacccgaaagcgaagaagaagtaatttttcgtttgccggaacatccggcaattaaaaaagcggctaaccacgccgctttttttacgtctgcaatttacctttccagtcttcttgctccacgttcagagagacgttcgcgtactgctgaccgttgctcgttattcagcctgacagtatggttactgtcgtttagacgttgtgggcggctctcctgaactttctcccgaaaaacctgacgttgttcaggtgatgccgattgaacacgctggcgggcgttatcacgttgctgttgattcagtgggcgctgctgtactttttccttaaacacctggcgctgctctggtgatgcggactgaatacgctcacgcgctgcgtctcttcgctgctggttctgcgggttagtctgcattttctcgcgaaccgcctggcgctgctcaggcgaggcggactgaatgcgctcacgcgctgcctctcttcgctgctggatcttcgggttagtctgcattctctcgcgaactgcctggcgctgctcaggcgaggcggactgataacgctgacgagcggcgtccttttgttgctgggtcagtggttggcgacggctgaagtcgtggaagtcgtcatagctcccatagtgttcagcttcattaaaccgctgtgccgctgcctgacgttgggtatctcgtgtaatgactggtgcggcgtgtgttcgttgctgaaactgatttgctgccgcctgacgctggctgtcgcgcgttggggcaggtaattgcgtggcgctcattccgccgttgacatcggtttgatgaaaccgctttgccatatcctgatcatgatagggcacaccattacggtagtttggattgtgccgccatgccatattcttatcagtaagatgctcaccggtgatacggttgaaattgttgacgtcgatattgatgttgtcgccgttgtgttgccagccattaccgtcacgatgaccgccatcgtggtgatgataatcatcattgtcatgatgatgatggtcatgatcgtcgtcgtcccagtcgatgctgctgaatagtgcgtacgtggtagcaacgcccatgctatagccgaatccgcgtacaaagctgtcaacaaacggttctccggctggtggtggcagataaaccggcggatacgcagtattggcccagttcccgtaaaccacggttgggttgtagttgggaatatagaccacatcaggattggcgggctcaatggaaatgacggttgttgccggctctgtaatgacggggttggcagttaaaactgtattggatggtatgacgggtgccgtgactgtctgttttaccggtacagctttcttcgttgtggtaataactttctgttcggttgatgacttcagcgagccggtttgttgcgccagttgccgcaatcgctgtaccgagtccatcacgtcctgcggctgggccagaaaagcatcgcccaggttttgcacccattgcgggttttcgcccatcaatgccatcaattgtggaaaggccaccagtgatttaacgctggcgtcccacggctggtcagataccgcctgaatagcagcatcgccttgtttaagtggattatcgtgcgaccattgcactgcttgagcaacgtttgtcggataggttgatgccatcagcacctgcgaaagtagggcgtcgggatacagcgcgacgggcgcgacccattgatctatttgtgcagtgctgaatgcggatttgacgacggcgggtgttacgggaggtgcggaaaccgttgcaggaaacgtaaccgcggcagcgtcagacacagccagttgtgtcgattgcggttccacaggcgcttccactgtgcggctttttatatatagcccggtagaggcggcacaaagcccggcactgcaaattagcgccagcacatggggtttaaacggcaaagtcattttcataattcggatctcaaggaaatcgcaatggtcggcgaactgccacccgcaggtgctgtgaatccgagtataaagaggcggtagtttaaattttgactaatcttgggattcgttgagaaaggtgattatcaccatgcgaattaacgaagtttttacggagggaaacaatctctagaccatccttaacgattcagccacttttttatgttgcttttttgtaaacagattaacacctcgtcaaaatcctgctattctgcccgttgcggtactgggcatttaccctacaaactgctgtctcacaggagcgtgaagagaatcgcctgccgcactatgacaatgagagcgaggagaaccgtcgtgctagaagaataccgtaagcacgtagctgagcgtgccgctgaggggattgcgcccaaacccctggatgcaaaccaaatggccgcacttgtagagctgctgaaaaacccgcccgcgggcgaagaagaattcctgttagatctgttaaccaaccgtgttcccccaggcgtcgatgaagccgcctatgtcaaagcaggcttcctggctgctatcgctaaaggcgaagccaaatcccctctgctgactccggaaaaagccatcgaactgctgggcaccatgcagggtggttacaacattcatccgctgatcgacgcgctggatgatgccaaactggcaccgatcgctgccaaagcactttctcacacactgctgatgttcgataacttctatgacgtagaagagaaagcgaaagcaggcaacgaatatgcgaagcaggtaatgcagtcctgggcggatgccgaatggttcctgaatcgcccggcgctggctgaaaaactgaccgttaccgtcttcaaagtcactggcgaaaccaacaccgatgacctctctccggcaccggatgcgtggtcacgcccggatatcccactgcacgcgctggcgatgctgaaaaacgcccgtgaaggcatcgagccagaccagccaggtgttgttggtccgatcaagcaaatcgaagctctgcaacagaaaggtttcccgctggcgtacgtcggtgacgttgtgggtacgggttcatcgcgtaaatccgccacgaactccgtactgtggtttatgggtgatgatattccacatgtgccgaacaaacgcggcggtggtttgtgcctcggcggtaaaattgcaccaatcttctttaacacaatggaagatgcaggtgcactgccaatcgaagtcgacgtctctaacctgaacatgggcgacgtaattgacgtttacccgtacaaaggtgaagtgcgtaaccacgaaaccggcgaactgctggcgaccttcgaactgaaaaccgacgtgctgattgatgaagtgcgtgctggcggccgtattccgctgattattgggcgtggcctgaccaccaaagcgcgtgaagcacttggtctgccgcacagtgatgtgttccgtcaggcgaaagatgtcgctgagagcgatcgcggcttctcgctggcgcaaaaaatggtaggccgtgcctgtggcgtgaaaggcattcgtccgggcgcgtactgcgaaccgaaaatgacttctgtaggctctcaggacaccaccggcccgatgacccgtgatgaactgaaagacctggcgtgcctgggcttctcggctgacctggtgatgcagtctttctgccacaccgcggcgtatccgaagccagttgacgtgaacacgcaccacacgctgccggacttcattatgaaccgtggcggtgtgtcgctgcgtccgggtgacggcgtcattcactcctggctgaaccgtatgctgctgccggataccgtcggtaccggtggtgactcccatacccgtttcccgatcggtatctctttcccggcgggttctggtctggtggcgtttgctgccgcaactggcgtaatgccgctggatatgccggaatccgttctggtgcgcttcaaaggcaaaatgcagccgggcatcaccctgcgcgatctggtacacgcgatcccgctgtatgcgatcaaacaaggtctgctgaccgttgagaagaaaggcaagaaaaacatcttctctggccgcatcctggaaatcgaaggtctgccggatctgaaagttgagcaggcctttgagctgaccgatgcgtccgccgagcgttctgccgctggttgtactatcaagctgaacaaagaaccgatcatcgaatacctgaactccaacatcgtcctgctgaagtggatgatcgcggaaggttacggcgatcgtcgtaccctggaacgccgtattcagggcatggaaaaatggctggcgaatcctgagctgctggaagccgatgcagatgcggaatacgcggcagtgatcgacatcgatctggcggatattaaagagccaatcctgtgtgctccgaacgacccggatgacgcgcgtccgctgtctgcggtacagggtgagaagatcgacgaagtgtttatcggttcctgcatgaccaacatcggtcacttccgtgctgcgggtaaactgctggatgcgcataaaggtcagttgccgacccgcctgtgggtggcaccgccaacccgtatggacgccgcacagttgaccgaagaaggctactacagcgtcttcggtaagagtggtgcgcgtatcgagatccctggctgttccctgtgtatgggtaaccaggcgcgtgtggcggacggtgcaacggtggtttccacctctacccgtaacttcccgaaccgtctgggtactggcgcgaatgtcttcctggcttctgcggaactggcggctgttgcggcgctgattggcaaactgccgacgccggaagagtaccagacctacgtggcgcaggtagataaaacagccgttgatacttaccgttatctgaacttcaaccagctttctcagtacaccgagaaagccgatggggtgattttccagactgcggtttaaaaagtcagcgcacgcgctgcgcataaacgacacaatgcccggtgaatgagattcccgggcatttttttatttctaaaccatcgccgttccgctgtttttctccggtaaggctgcgataattacatcaatggcgcaatgcgatttcggtgcattgccgggagcagaggaacacactatggattacgaatttctgcgcgatattaccggagtggtaaaggtgcgtatgtccatggggcatgaagtggtcgggcactggtttaatgaagaggtgaaagaaaacctggccttgcttgatgaagtggaacaagcagcgcacgcactgaaaggtagcgaacggtcctggcaacgggcagggcatgaatacaccctgtggatggacggtgaagaggtgatggttcgcgccaatcaactggaattcgctggcgatgaaatggaagaggggatgaactactacgacgaagaaagcctgtcgctatgcggcgttgaggattttctgcaggtcgtggcggcttaccgcaatttcgtgcagcagaagtaaataaatctggcggagcctgggagctccgccagagccgttaaacagctggcatattgcgcccgtaataaatctcgcgcatttctttccacagcgcagcggtaatttcctggcgctcgctgtcggttaagtcttccggtttggtgtggaacatgtagtgcttaaggtcgaactctttaagcaacatcttggtatggaagatattttcctgatagacgttcacatccaccatgtcatacagcgccttcatatcgtcagacataaagttctgaatcgaattaatctcatggtcgataaagtgcttcataccgttaatgtcgcgggtaaaaccgcgcacgcgataatcaatggttacgatatcggactcaagctggtggatcaggtaattcagcgccttcagcggagaaatcacgccgcaggtagagacttcaatatcggcgcggaaggtacataaaccgccttcaggatgactttccgggtaggtatgtacgcaaatatgacttttatcgagatgggcaacgaccgtttctggcagtgggccggggtgttctgttttgtcgatgagtttcgggtcaaccggttcttcactcaccagaatagtgacgctggcaccctgtggttcgtaatcctggcgggcgatgttaagaatattggccccgataatggaacaggtttctgacaggatttcggtcagacggttggcattatagagttcatcgatataagcaatataaccgtcgcgctcttcggcagttttggcgtagcagatatcgtaaatacaaaaactcagacttttggtcagattattaaagccatgcagtttcagttttttcaatttcttatcttctccttaggacggctgtgaagccagtgcgtcttgcagatactgaggtaaggcaaaagctgccgtatggattgccggattgtaataacggcatttcaggccagaagcgagaaaacgcgcctgaataatttcggttgagagatggcgtaaggcgtcgttatctgtcgcccatgcaaaagtcatgataccgccgtaataggtcgggatcgccgcctgataaaagccaacgtcgctgaagtaatggctgagtttgcgatgactgtcgatagcctcttcctgctgtaaaaagcagacgccgttttgtgcgacgaagataccgccaggattcaggcaacgtttgcagccttcataaaatgctgaggtgaacagactttcgccgggaccgataggatcggtgcagtcggagataatgacatcaaaggtctggctggtttgattaacgaaattgacgccatcgtcgatcaccagcttaaagcgcggatcgtcgtagctaccggcgttatggttgggtagatactgacggcagaacgatacgacacccgcatcgatttccaccatcgtgattgactcaacgtttttatgtcgggttacttcacgcagcatggcaccgtcgccgccgccgataatcagcacatgtttcgcgtgaccgtgggccagtagcggaacatgggtcatcatctcatgatagataaactcgtcgcgctcggtggtttgtactacgccatccagcgccattacgcgaccaaatgcagcgttctcaaaaatgatcagatcctggtgatcggtcttttcatgatacagaacgttatctaccgcaaagtactgcccaaactggtcgtgtagcgtttcatgccactgttttttttcggccatgggttgatacctcctttgttaacacccgtaaaaaaagggcgcaacataatagctaacattgaccgcggatgcacggtcaatatttctacaaaaaggtatcagggattatttgacgtaggcaagcaggcttaaggaatcgcgggccagggctttgcattttttagcgacaggaatgccaatgccgctgagatcgcggtagctgtcttcaccgagagctttcatgtcgaaggtgtcgtaattactgagatcccactggttttgctgggcgaaaaagaccagtgcgcgacgaatttgcccgttaggtaagttctggtaaccacaatcgttcttcagaaagacaaaaactgccgttaaatcggccatatcttcggcttcagactcgctgagcgcgtaactgtttgcgcaaacggccatcaggctgccgaataacactgttctgaaaaacgtcttcattgcttctaccaggggcttaaagaagataaacgttagcacactgcgagcgaggcgacgaccattattgtcgattaaattgtgtctgcggcttgaccttcccgtaaggggaaggactatgctcaacgtttgatttcgtttcgcctgcttaagaataaggaaataactatgcaacgtcgtgatttcttaaaatattccgtcgcgctgggtgtggcttcagccttgccgctgtggagccgcgcagtctttgcggcggaacgcccaacgttaccgatccctgatttgctcacgaccgatgcccgtaatcgcattcagttaactattggcgcaggtcagtctacctttggcgagaaaactgcaactacctggggctataacggcaatctgctggggccggcggtgaaattacagcgcggcaaagcggtaacggttgatatctataaccaactgacggaagagacgacgttgcactggcacgggctggaagtaccgggtgaagtcgacggcggcccgcagggaattattctgccaggtggcaagcgctcggtgacgttgaacgttgatcaacctgccgctacttgctggttccatccacatcaacatggcaagaccgggcgacaggtggcgatggggttggctgggctggtggtaattgaagatgacgagatcctgaaattaatgctgccaaaacagtggggtatcgatgatgttccggtgattgttcaggataaaaaatttaacgctgatgggcagattgattatcaactggatgtgatgaccgccgccgtgggctggtttggcgatacgctgctgaccaacggtgcaatctacccacaacacgctgccccgcgtggttggctgcgcctgcgtttgctcaatggctgtaatgcccgctcgctcaatttcgccaccagcgacaatcgcccgctgtatgtgattgccagcgacggtggtctgctacctgaaccggtgaaggtgagcgagctgccggtgctgatgggcgagcgttttgaagtgctggtggaggttaacgacaacaaaccctttgacctggtgacgctaccggtcagccagatggggatggcgattgcgccgtttgacaagccgcatccggtaatgcggattcagccgattgctattagtgcctccggtgctttgccagacacattaagtagcctgcctgcgttaccttcgctggaagggctgacggtacgcaagctgcaactttctatggacccgatgctcgatatgatgggtatgcagatgctaatggagaaatatggcgatcaggcgatggccggaatggatcacagccagatgatgggccatatggggcacggtaatatgaatcatatgaaccacggcgggaagttcgatttccaccatgccaataaaatcaacggtcaggcgtttgatatgaataagccgatgtttgcggcggcgaaagggcagtacgaacgttgggttatctctggcgtgggcgacatgatgctgcatccgttccatattcacggcacccagttccgtatcttgtcagaaaatggcaaaccgccagcggctcatcgcgcgggctggaaagataccgttaaggtagaaggcaatgtcagtgaagtgcttgtgaagtttaatcacaacgcaccgaaagaacatgcttatatggcgcactgccatctgctggagcatgaagatacggggatgatgttagggtttacggtataaaaagaccgtattcggaaatatgcccggatctctccgggcattaaactgatgacaaacgcaaatctgcctgatgcgctacgcttatcaggcctacgctacctgtgcaatccattgattttgcacaattttgtaggctggataaggcgttcacgccgcatccggcatgaacaacgcgcacgttgtcagcaatctgagcaagtcttacttcacatcatccggcagcgcataagccacaatatagtcgcccatcttcgtaccaaatgaaccgtgaccgcctgcggagatcaccacgtactgcttgccattcacttcataggtcatcggtgttgcctgaccacccgccggtaaacgaccctgccacagtttttcaccgttgctcatgttgtaagcgcgcaggtagttatctgccgtagcggcgataaacagcacgttacccgccgtggagattggcccgcccagcatcggcatacccatattgaacggcaccggaaccggcatcgggaacggcatactgtcctgcggcgtaccaatacgtttcttccacaccacttcattggttttcagatccagcgccgagatataaccccatgctggctgtttacacggcagaccaaacggtgagaggaacgggttgagcgtgacaccatacggtacaccgtactgtggctgaatgccggattccgtacccgtgcctttggcatctttcggctgctccatcgggttacccggaccgcgtgggatcagtttcgaaacaaacggcagtgccattgggttggcaattgccacttcacgatttggatcaacggaaatcccgccccattcgaacatccccaggttacccgggaagaccagcgtaccctgttcagatggcggggtgaaaatgccttcatagcgcatctggtggaacatcacgcggcacaccagctggtcaaacatggtggctccccacatatccgcaccgctcaaatctttcgtcggacggaagctcagttcagaaaacggttgagttggggttacgtaatcgcctttcgctgcaccttggggaaccggtttttccggtgccggaaccaccagttcgccattacgacgatcgagcacaaaaatgttgccggttttcgccggagcgtaaataactggcactttctgaccattaacggtgatgtccgccagcgtcggctgtgccggaagatccatgtcccacaggtcgtggtgaacggtctggtagctccacgccagtttcccggtagtggcattcagcgccagaatcgagctggcataacgttcctgttccggtgtgcggttaccgccccagatatccggcgtggtcacgcccatcggcagatagaccagatccagcttcgcgtcataggccgctggtgcccaggagtttggcgagttaaaggtaaaggtgtgttcgtcagacgggattgcgttcggatctttcgcgccgggatcaaaagcccacagcagctccccggtgttgacatcaaaaccacggatcacgccagacgtttcgcgggttgagaagttatcggtaactgaaccggccatcacgatggttttatcggtgataatcggtggcgaagtcggttcatacagacccggtttggtgtctggcatattgctttgcagattgagcacgcctttattggcgaaggtttcgcacagtttgccgttttcagcgttaatcgcaatcagtcgaccatcattgaccggaagaatgatacgacgcgggcaatccgccatcacttccggcgaagcggtttctgctttggcttcatgataagagacaccacggcaggttacgtgctggaaagactcgttggttttcagctcaggatcgtaatgccatttctctttgccgctggcggcatcaagcgcaaacaggcgctggtgagcggtacacaggtaaagggtgtcgcccactttaatcggcgtcacttcattggtgatttcacccggatcgttcggctgcttcacatcgccagtacggaacacccaggcttctttcagattatggacgttatcggcgttaatttgtttcagcggcgaaaagcgttgaccttcctgattacgaccataggcaggccagtcctgatcggctacgggggagatagcttcagcaggtgtggcatcggcgcttaaggtgccgttgatctcctgcggatcgttaaatccggcccaggtcaggataccaccgctaatcagcagtgcgaccaccagtgcggcaactgcgccgctggcaggaatgaccaggcgacgccagacaaacggcaggatcagccagatgccgaagaagaccagaatgtcgctgcgcggagtcagcgcccagaagtcgaaaccaacttcccagacgccccaaatcatggtgccgagcagcagggctgcgtatagccaaagcgcggcgcgtttactgcgccacagcatccaggcgacgccgagcatcacaaggccagcgatagggtagtaccaggagccgccaatcgcgaccagccagcctccgccaatgagtagatacagcccgcaaagcgctgcaaaaagggctgttagcgtgacgagtaatcgtcgcgagcctgtattgttaattgccataaagagacaccatttcaattcattaatattttagtagcaattaattataggttttaacatgtgtgatcgtcatcacaattcgagctttattaacagattccgcgaatgaatagttttactggtatactgcgtgtcttgcgctttgttgcggtgccaaaacctgcccgtgcgaagtgatttgtttttaaatcatatggttagagatatgaaacatactgtagaagtaatgatccccgaagcggagattaaagcgcgtatcgccgaactgggtcgtcagattactgagcgttacaaagacagcggcagcgatatggtgctggtgggtctgctgcgtggctcatttatgtttatggcggacctgtgccgtgaagttcaggtatctcatgaagtcgactttatgaccgcctccagctacggtagcggcatgtccaccacccgtgatgtgaaaatcctcaaagatctggatgaagatatccgtggcaaggacgtgctgattgttgaagatatcatcgactcggggaatacactgtcgaaagtgcgtgagatcttaagcctgcgcgaaccgaagtcgctggcgatttgtacgctgctggataaaccgtcccgtcgtgaagtgaacgtcccggtagaatttatcggtttctcgatcccggatgagtttgtggtgggttacggcattgattacgcacagcgttaccgtcatctgccgtatatcggcaaagtgattctgctggacgagtaagtgtgaagttgccggatgtgttgcatccggcatggcatttttatttgtggttggcgtgtttcagcttgaggttggaaatcccgtgacggtaacgttgctcaagggtttcgcggttggtggcggtaacatccagatcacgcagcaagccgtcgtgaatgccgtaggcccagccgtgaatggtaactttctgcccgcgtttccacgctgattgcataatggtggagtggcccaggttatacacctgttccatgacgttcagttcacacaaggtatccagacggcgctcttgcggcatttcgccgagcaatgagctatgtttgaaccagatatcgcggatatgcagcagccagttgttgataagccccagttccgggttttcaactgcggcttgtacgccgccgcaaccgtagtggccacagataataatgtgttcaacttcgagtacatccactgcatactgaaccacggaaaggcagttcaggtcagtgtgaatgaccaggttagcaacattacggtgaacaaagagttcgcccggctcaagaccggttaaacgttctgcaggaacgcgactgtcggaacatccaatccatagaaagcgcggtttttgcgcttgtgccagtttctcaaaaaacccgggatcctcttccaccagcatttttgaccatagtgcattgttgctgatgagtgtatctatgtctttcatggaggttaacgacctgtaaccaaataattacgtttggctaatatagggcaactccgggacgatttaaaccacagataaagtgtaagaacgtaaggtaagtaaaaatttatgaccattgcactggaacttcaacagcttaaaaaaacctatccaggcggcgttcaggcgcttcgtgggatagatttgcaggtcgaagcgggtgatttttatgcgcttctcgggccgaacggggccgggaaatcgaccactatcggtattatcagctctctggtaaataaaacctccggacgggtcagcgtatttggttacgatctcgagaaggatgtcgtgaacgctaaacgtcagttgggactggtgccgcaggaatttaacttcaacccgtttgaaaccgtgcagcaaattgtggtgaatcaggcagggtactacggcgtggagcgcaaagaagcgtacatccgcagcgaaaagtatcttaaacaactcgatctatggggaaaacgcaacgaacgtgcgcgtatgttatctggcgggatgaagcgccgtttaatgattgcccgtgcgttaatgcatgaacctaaactactgattctcgacgaaccgaccgcaggcgtggatattgaacttcgccgctcaatgtggggctttttgaaggatttaaacgacaaaggcaccaccatcattctcaccacacactacctggaagaagcagaaatgctgtgccgcaatatcggcattattcaacacggtgagctggtggaaaatacctcgatgaaggcgctgctggcgaagctgaaatcggaaacctttattctcgatctcgcaccgaaaagcccgttaccgaagctcgatggctatcagtatcgactggtcgataccgcgacgctggaagttgaagtgctgcgtgagcaggggatcaacagcgtatttacgcagttaagtgagcagggcattcaggtattaagtatgcgtaacaaagctaaccgtctggaagagctgtttgtttcactggttaatgaaaaacaaggagatcgcgcatgatgcatctttactgggtggcgctaaaaagcatctgggcgaaagagatccatcgctttatgcgtatctgggtgcagacgctggtgccgccagtcatcaccatgaccctttactttattatcttcggtaacctgattggttcgcgtattggcgatatgcatggcttcagctatatgcagttcatcgtaccggggctgatcatgatgtcggtgatcaccaatgcctacgccaacgttgcgtcatcattttttggtgccaagttccagcgtaatattgaagagctgctggtagcgccggttccgactcacgtcattattgccggatatgtcggcggtggcgtggcgcgtggtctgtttgttggcattctggtgacggcaatttcactgttttttgtgccatttcaggtgcattcgtgggtattcgttgccttaacgctggtgctcacggcggtgttgttctcccttgcgggtttgctgaacggtgtgtttgccaaaacgttcgatgacatcagcctggtgccaacctttgtgttaacgccactcacgtatttgggcggggtcttttactcactgactttgttgccgccgttctggcaagggctgtcgcacctgaacccaatcgtttatatgatcagtggtttccgctacggcttcctcggtatcaatgatgttccgctggtcactacctttggcgtactggtggtctttattgtggcgttttatttgatctgttggtcgctgatccaacgtggacgtggtttgcgtagctaaggctatttcctctcctctggatttgggggagaggagttttgacggctatcaccctttatcaacaatggtcagggtagactgattttcggctaaggaggaaggcgatgttaggttgggtaattacctgtcacgatgaccgggcgcaagaggtactggatgcgctggagaaaaaacatggggcacttcttcagtgccgggccgtgaatttctggcgcggattaagctctaatatgctcagccgcatgatgtgcgatgctctgcatgaagcggactctggtgagggtgtcatcttcttaaccgatatagccggagcgccaccgtatcgcgtggcttcattattaagccacaaacactcccgttgcgaagtgatttctggtgtcacgttaccgttaattgaacagatgatggcttgccgtgaaaccatgaccagttcagagtttcgcgagcgtattgtcgaactgggtgcgccggaggtgagtagtctttggcaccaacaacaaaaaaatccgcctttcgtcctcaaacataatttgtatgagtattaacccgcgattctgatggcgcttttgctacaataaaagcgttgtttcaccctcggttattttttcatgtacaaacaagctgttattctcctgctgatgctgtttaccgcaagtgtcagtgccgcgttacctgcccgttatatgcaaaccatcgaaaatgctgcggtctgggcgcaaattggtgacaagatggtgaccgtggggaatattcgggccggacaaatcattgccgtggagcccactgccgcaagttattacgcatttaattttggctttggcaaaggttttatcgataaaggtcatctcgagccggttcaggggcgacaaaaagttgaagacggtttgggcgacctcaacaagccgctgagtaatcagaacttagttacctggaaagatacgccggtctataacgcgctgagtgcgggaagtgcgccatttggggtactggcggacaatttgcgctacccgattttgcataaactgaaagacaggttaaatcaaacctggtatcagatccgtattggcgatcgactggcctatatcagcgcactggatgcccaacccgataatggcctgtcggtgctaacctatcaccatattctgcgcgacgaagaaaacacccgttttcgccatacttcgacgaccacatcggtacgcgctttcaataaccagatggcctggctgcgtgacaggggatacgcgacactgagcatggtacagctggaaggctacgtgaagaataagatcaatctccctgcgcgagcggtggtgattacctttgatgatggcctcaagtcggtgagccgctatgcgtatcctgtgttgaaacaatatggcatgaaggcggcggcgtttattgttacctcacgcatcaaacgtcacccgcagaagtggaacccaaaatcgctgcaatttatgagcgtttctgagcttaacgaaattcgcgatgtatttgatttccagtcacatacccattttttgcatcgggtagatggttatcgccgacccatattactgagccgtagtgagcacaatattctgtttgattttgcacgttcacgccgcgctctggcgcaatttaatccgcatgtctggtatctttcgtatccgtttggcggatttaatgacaacgccgtgaaggcagcaaacgatgccggatttcacctggcggtgacaaccatgaaaggcaaagtaaaaccgggggataatccgttgttactaaaacgactttatatcttaagaacggattcgctggagacgatgtcgcggctggtgagtaaccagccgcagggataacaatcaagcaacctgtaccggaatcgctttcgcggtacgtttcatttcattgtcgccttcaaaataggcgacgttgggtcgccaggtgcgagcttcttcatctggcatggtaacgaagctggcgatgatgacaatatcgccgacactggcgcagtgggccgccgcaccgttaacagaaataattctcgaaccgcgttctgccgcgatggcataagtggagaaacgcttgccgttggtgacattccagatatcaatggcttcgttttcgagaataccggctgtgtcaagaaaatcctggtcaatggcgcaagaaccttcatagtgcaggtccgcatgagtcactttcacgcggtggagtttgccctgcagcatcgtgcgaatcataacttctacctttctaccctgtcgttaacgaagcaggcgatgcctgctttgaggaaattctcacgcagtattgcccgatttttgtttagtgtctactcatctgacggcatttgcgtcagcagtttgcgtaccgcgccgaagcgtgccatgtatcgcctgtaacgaattgatatttctctgaacgctgctcggtaaacaataaagaggtggctgacgatagcgcgccttgactggatactgccttcacgcaaagccacacggaagacagggaagatggatgcaccgagtaccacaccgcatgacgcggtatttaaacaatttttaatgcatgcggagacggctcgcgactttctggagatacatttgccagtggaattacgcgaactttgtgacctcaacacgcttcatttagagtcggggagtttcattgaagagagcctgaaaggacacagcacggacgtgctctattccgtgcaaatgcagggcaatcccggttatctgcatgttgtgattgaacaccaaagcaagccggataagaaaatggcctttcgcatgatgcgttattctatagccgccatgcaccggcatctggaggctgaccacgataagctgccgctggtggtgccgatactgttttatcagggcgaggccacaccttatccgctatcaatgtgctggtttgatatgttttactcgccggagctggcgcgacgcgtctataacagtcctttcccgctggtggatatcaccatcacaccggatgacgaaatcatgcaacatcggcggattgcgattctcgaactactgcaaaaacatattcgccagcgcgacttaatgttattgcttgagcaactggtcacgctgatcgacgaagggtacactagcggaagtcagttagttgccatgcaaaactatatgctgcaacgcggtcatactgaacaagcggatttgttttacggtgtgttgagagacagggaaacgggaggggagtctatgatgacgctggcgcagtggtttgaagagaaagggattgagaaggggattcagcagggaagacaggaagtaagtcaggaattcgcccagcgtcttctgagtaaaggaatgtctcgggaagacgttgcagagatggcaaatttacctcttgctgagattgataaggtaattaaccttatttaagttacctgtgttatgacagatgacgtggggtaaattaataactggcgccatcagccgtagcgccagttaagtattacgccagctcgaccattttgttgtcgatcaggcgagcatcgccaagccaggcggctaccagaattactgcccgtttgctggtttcagaaacttccagcaatgtgtcggcatcgcgaatctgaatatcatcggcgcggaagcctttttcattcagttcttgccccgcaatggtaataatttcatcgagatcccgttccccagcctgcaatttgtcagcaatcgaacttaaaactttgtacagaccaggcgcaattttgcgttgttccgccgtcagataaccgttacgggaacttagcgccagaccgtctttggcgcgcataattggcacaccgacaatctcaatatcgaagcccatatcggcaaccattttgcggatcagcgccagttgctgaaaatctttttcaccgaagcaggcgatgtccggctggaccaggttgaacagcttgctgacaatagtcgaaacgccgcgaaaatgtcccggacggctggcaccttccagcatggtcgaaaggccaggaacgtcaacgtaagtgtgggtttcagtaccgttcgggtagatctcttttaccgaaggggcgaaaactaaatccactttacgtttgtttagcttctcgcagtcctcctgcaaggtccgtggataacgagccagatcttccgggcggtcgaactgcatcgggttaacgaaaatactgacgacgaccacatcggcgcgggctttggcttcgtcgaccagcttcatatggccatcgtgcaggttacccatggtaggcaccagcgccacgcgcttgccttccatacgcaggcggcgaatttgctgacgcagcagcggcagggtttcgataattaacacaacgtgactccttaatggaaactgtgttcttcgcccggataaacgccggactccacttcagccatatactgccgcacagccgcgcggatgtcgcccgtttcggcgaggaaatttttagcgaatttaggaatgtgaccgccggtaataccaaaggcgtcgtgcatcacgaggatctgcccgtcagtgacgttgcctgcgccaatgccaataaccgggatcgccagtgcttcggtaatacgttttgccagttcaaccggcacgcattccagcaccagcagctgtgccccagcggcttctaaggctaatgcatcgctgagcagttgatcgcccgcttcatcgccgcgcccctgaactttgtagccaccgaaaatattcactgactgtggggttaaacctaagtgaccacatacaggaacggcacgttcggtcagcatttgtacggtttctaccagccattcaccgccttcaattttgaccatgttggcaccggcacgcatgaccgttgcggcgttttcaaaggcttgttccggtgtggcatacgccataaacggcaggtcagccaacagcaggcagtttggtgcgccgcgacgtacggcggcagtgtggtaggcgatatcggcaacggtaactggcagggtggagtcgtgcccctgaaccgtcatgcccagcgaatcgcctaccagcatgacgttaagtccttcatcagcaaacagtttcgcgaagctgtagtcgtaagcggtgatggttgcgaaacgttttttttcctgtttgtacttctgcagtaaggagatggtggtcggtttcataacgtatcctgataaattgatgttgtgctgtctggcattttatcagtcacattggtgggggcaatgatttatccgtagcagcactgccagaaggtgacagtgctgctacgttatcagggataggttacctggaaagtactggtggctttaaattcgccgggttcgatagcaatattcccgtcttgctttaatgttgcctggaaatgaagaggctgtgatgtgccgttaccttgattagggtaaaccccatcggaggtgtcatcttcggtttcataatctatataaacagaattcgtatcattaggttttaatgtcattagcggatttttactggttgctaaaccttcaatgagtacgccaacgcctttggcggcagtgcttccagtaagcgtattaccaagcagttgtgtgttttgagtacctacttttccagtgacgagttttgtttcaatattacgcacacgaatacaattctgaagcgagatatcaaagggaacaggtgaagcgccatttttaattgtcccagagctatattctcccattctaaccgttgaaccactgactgatggcccggtaagtatggaggtaaaacatgttggtaaggttaatttgacattattcagtgtgaaattgacataaatgtggttgctgtgatctacaacttttgtaccaggactgtaggccttaaacgaataaaggtaatttgatgaactggataactggacttgctgattaagtgtaggatcgaaattagtatctgtataaaattcaacagttatgttgtgtactataccaccaatagcccaaaacttatcgtagtcgtctgctttgttgcaacccttagtttgtagatcgctgtctgtgacggaaaagaaaaattcttggttggaaggatctccgatatagattcctggcgattgaatgtcagttattgtatcgtatgcagaccagacccttgatattaacatggtgtaatacagaccaggaacagatgtattaaatagtttatgtccgccataatctttacctgaatagaccatggcattttcaatagttattggaccaggattcgctctgccagatgtattgcagtaaagaataccaccaccggtacctgtatccaggtatgaccagtacatttttaccccagtcgggccgagctgcgtgggtttataaaaaaccaagttgcttgctgttgatgtgtaattaaaggtcatctgtgcggcagtggaggggcctcgatagttatcaactcctgcattatttcccacaataaaacttgtatatgcactgactgtattacaacaagaatacagtgctaaaaaaagaatgtacctgaagatagtcttcatttttactccaatgtttctttattgttatggtttgcgctgtttttgtttgttattcgtagtaaatatccactaacacatggctcataagttgaccagatgtaacactcaatgcaggatcgattttttgcattcgggtgctaaatttccaggatgaaccattcatgtcatccgacattactggataaacggaacgagatccgcctgaagcattaagaacattgaatgtattcgccgaatcctgagtagaaaatataactactcctacattacttgctcctgacgaaatttcattagcaaatatttgcctggagccagcagccatgacaccgctaagggctctaaaatcaatatgtaactgatttagcacatcgccagttccctgtaatgcacagtcggatacagtgatagtgaactcttttccacctggttgataactttcaggagtaacattacctgaaaaatatcccaccccaacgacgccaagatcaatattaccctggttactgattccgcttttgcaggtgctgttttttacattggcaacaaggtcaatatcctgtccagcgatggctggacaggcgatgcaaaacagtaatgacagaaacagaattattctcttcatcagcttacgttgagtgggatgcatatatagttcctgaatctgtaagtctgttagttataggttactgtaaatgtggctggtgcagaaaacttacccgcagtgacattgtttacggttttatttttttccacgaccaggcgtgcactcatcggataataaacgaccgcattggctgcagtggagattgttacctcttgtgatgctggtgttacacaactaaattgtgttgcactccctgttgccggagttacagtgctccagacttcaacggcgacagcacttgctttatctgcggctgtggaaccatttgcaaaccccgcaccgtcattagcagttccctcgcatgtggctcgcttggttaattttatttgcgcttttttattggggatacccgcacagtctttgaatttgagtttgaatgtttttactttggtcttggcattgatttcagaaatatatacatcaccaaaatcaacaacagaaatgtcctgatcagagtcatttactaatgtagcggtacaagtacccatttctacagtagtaataacggtcagtccaatactgtctgttgccgcataagagagtacgctgaacaatgaggcagccaaaacgacactgctggataatccataacgtaaatttttaaatgtcatcataattatccttcttattgatagatgaaattaaacgtcgccagtgcacgaaaattccccggtacgccttgccctgcatctgtttcacgtagcgcaacggtcatttcaagacccttatcgggctgcatctcgtctgtgctccagcgtatcttttccgcactgttaggtttaaggaaagtggcatcatcagtagtccgttttttgaaacccataccgatattacttgtcgtcgaagatgaatcaccagactgcggtataataagcttaggtgagcttgatgatgcatttccggtcagagtggtatcaatccaactgatgccactgctgcacccactggcaaccagtttaaaatcagcctgagattctgtcgttttattcgcgatcttatccagacccatcttagggattctcaatgtgtagttattattgccatcattcgtgacgttattaccagtaagtgtgatgttacaggttgtcgctttgacagtggctgtaaactctacattaatatccgttgcaaatactgagggtgataataatattcccatcagtatcactattttatgtggcgttgtttttatcatttgacgtcccttgtagttactgaatctgacaccgaattccattcagaataatagattgtgctattttttctgcttctgggctttgttgataatgcgcaagacaacttactggtttactttcttcgagccatttaatgctgatatttccctgctgctcaataccacgaacaaatgcttgtccaccctgtccaacattaccaatgacattgccttgctcatcataaatatctgcagcaaatggaatatttttaccatcacttcgtgtgatgttcataatggctgattgcccttgcacggtttcaaaatcagcaaagacgactgaaccctgacgcggcacagcaacagcactggtactttttaattcaacatcgttctcaagatcgttgatatccagcgcgatacggttttcatgataaggagaaagagcactggtgacaccataaccccatcgatcgatagtactgttgccgtaatttattcgcgccccttgagcacctggtgcctgaactatcgccagtgtatcggagtcgctaaaactgtcattgctgaaggtcaggccgccgctatgcaatacaaaaccaccgtcggtgttgagagaaacttgacggctgttatcgctatttgcagaaattgaacctgccagcgttcctcacggtgactcatagctggcataacccccaacataactcaaatctttgctggctttattcatcgtatagccagtattcacgctataactgacgcgagcgttatcgctatagccactgctactgacgttgagttggttattacccttaaagtcactgcttagttgcgtgtcaatactctggaaacctgaattacgttgttcagtgccaagtaatttttcaataggaatggtgaaactgagataaacgctatcgtcagtgtcgccgtcttcattccatgaacgctgtgcactgacactgtagctgccccaggatgcactgttactgtagccaatagagtaattgctacgattttgtccggaagcccagtaatcggaccaacttccggaaagataaaatgaaccgtaatcttttttctcaaatttcaacggttggttaatactgaccgtaacctggtttttcatgcgcgagtaattacgcatggatttcggttcaagatcttgttcgggatgtttcacttcatcaattagagttagtgcatcattaagaccaaggtaattctgtgtcgaatagcgataggctgcgatattcagtgaagtacttgtttcttcgaataacttgttccaggaaacacgataactttgtccctgatatgttttatcatccggtatacgaacatttgagtgagtcacatcgaaagaaaatgcaccgactgaagtattcagaccaagacctaacaacccggcagtataattattatcagtaagctgaataccggtataacccgtcaggtagttattcaaaccatagtagtagctggcctgaaataaattaggctcatcctgaatatcatcttttaaaatctgaccaccgctaatatcccaacgtccaacgcctgggcgtaacatttgaacgaccgatgaaaaaggttgcgagaatgtccgctttgagccatcggattcttcgacagtaacaataagatcgctgccgtaccctgacggactcagatcatcaatgacgaaagcgcctggtggcaccgtcgtttcataaatcttatagccaccttgcgtaatagtgactttagcgttggtattagcaacgccatgaatgataggcgcaaaactggctaatgtcggaggcaacatgcggctgtcactgtataagcgaatgcctcggatactgacggaatcaaaggtttcgcccgtcgtataagactcaccaagaatgagttgagaacgcagcgaggcgatatcacgctgaacataccgattcttaaaatcataattactgccagaatcggtcatccagttgtagttgcctgaagcacgcagtcgccatgcacctaaattcatcccaccgttaaaagcagcataaatgctgtcatttcttcgaccaggggtttcactatgatatccattgaggttgtatgacaacatggccgcattaatgccattttcccataacgagggatcaacatagttttggtaatttttcattacccaggcttgaggaacgtctatatccagacgttgatcgttgacgtcataacgaacggaagcctgagggataatttccgtcaaattgaggcaattgccgagcgtttcatcccgggcaagcagaacggctttttcgttatttatatcgggagaattaatatgaaactgcaataaattctttaatgtgatacaagcctgggcgttcttttttccttcaactgcgacaaatgtaatactttggttaatgattggttggtcgttgacataaacactgacgtcgtaaacacccggtatagcggggttaccttcactgtaccggctgagatcaatattagatgcattctgccccatcaggaaggtatggtcatattcaacgagttcagcactgaaagcactattgcaatacagcagcgcgcaaaacgtggcgatacgggtcagatgatgataatttttagtatattctatagtcacgctatgcttcctgcggaattatatccttgcctgattacagcctggcattaccttcaattgcgccaccaaagtcattaatggcgtaaaaatgcacttttgcagaattcgctttgccattaaggccattgactttcatgacctcatcactaaatggtgcaatcattttcacatcaatcggatagcgtttaccgctggcttctaaatcaccactgctaaaagagacgtagtaaggggttggattggtcactcgtaatgacgccttaccttctgaacctgaccagaaccacttcagggctaacggggcttcagagggatttcccttcaatccatccgggcgatagaaaagttttatacgtgtgcgaaatgccagttgcagcaggctttgattcgcgaccttttctgcatctggttttggtggaacttccagtacgttaaaccagaacacgctctctctgtctttaggcagtgaggtgctggctgtgtacattaatttgattgtttgcccacgtttggcatcaatacgcgatactggcggcgtggcagtaaaagggactgtaatactgccaggctcagcgttgtcatcgccagtatctaaccaactctggacaagcaacgggttattccctttattttccagacgtacgttgacacttttttgatcgcttttatatattacgcgagtacccgaaatgacaatgtccgcaatagacgatgaactaaaagccatacaggttacgaagcataaagctgttgtatgtttggtgttaaaaaacataaaccatccctgacagagttaattaaaacaggggtgatgctgccaacttactgatttagtgtatgatggtgtttttgaggtgctccagtggcttctgtttctatcagctgtccctcctgttcagctactgacggggtggtgcgtaacggcaaaagcaccgccggacatcagcgctatctctgctctcactgccgtaaaacatggcaactgcagttcacttacaccgcttctcaacccggtacgcaccagaaaatcattgatatggccatgaatggcgttggatgccgggcaacagcccgcattatgggcgttggcctcaacacgattttacgtcacttaaaaaactcaggccgcagtcggtaacctcgcgcatacagccgggcagtgacgtcatcgtctgcgcggaaatggacgaacagtggggctatgtcggggctaaatcgcgccagcgctggctgttttacgcgtatgacagtctccggaagacggttgttgcgcacgtattcggtgaacgcactatggcgacgctggggcgtcttatgagcctgctgtcaccctttgacgtggtgatatggatgacggatggctggccgctgtatgaatcccgcctgaagggaaagctgcacgtaatcagcaagcgatatacgcagcgaattgagcggcataacctgaatctgaggcagcacctggcacggctgggacggaagtcgctgtcgttctcaaaatcggtggagctgcatgacaaagtcatcgggcattatctgaacataaaacactatcaataagttggagtcattaccaaaacagggaataatataaaaatagaaattattaatactattccctgtatattcattcaatcaatttaattggtgaatacttactgataagtaatggtgtatgcagtgttagtttttacataaccagcagttgctgtttggtctgcgacggcacgaacgtaagacgctttaaaatcataaccagcagttgctgtttggtctgcgacggcacgaacgtaagacgctttaaaatcataaacagcagattttgtcgttgcatccagggctttagtatacacatcgccagggttgttaatttgaacctgtttgatagtggaaccatcaatattgtgcagagcgatattaacgccgtcagatgggttgttaatagacatgtcgttgttcaaagtccctttgctgttaccaaagaaaacagaaccgaaggtcattttagccgtgctacctggattcggatttgctttgctgcagtcaacggtgatgctgaaaggtttagctttagcgccaacggtgtcattcagtacgccagcatcgatttcaccaacagtggcagtttgcagcaggatcagaccatctttattaccgccgtcaacgcgggtttcacaggtgttatcaacaaccagaccactgatatttaactgaccaccatccatatcagcagaagcagtacctgcaaccattgccagcataagaccagacagggcaaaacctaattttttagacataaaaatccttgaataaaattccattagtcagactactggtttgaagaatgactattcatgacacaaatgttataagcagatgctagatattaatgagcaatgatatttgttaccagaatttacaaccattgttcattaggacgcctattgtgcactttaagggcttttgaacaaattaaattttcttaattcaaaattaagcaaaaataaattcacaagtgcaattggttagggtatggcgatgggattgatatttatctgcgggaatttatattatgtttctgcaaaaatgtttaaactaaaatttttattaaggaaagagaggatgtatgattttcagaaaatatttatattcgtaatataaataaattaccatttgcttaatttgtcaaatgctcttgtatgtaagacttcacgcaacgtctccccatcaggaaacgccagctccggtgcaatctcaaacagcggccacagcataaatccacgattcttcatatcgtagtgcggaacggtcaggcgttcggtatttatcacttcattaccaaacagcatgatatcgagatccagcgtgcgtggtccccagcgttcagctttacgaacacgaccctgttgcagttctatgcgctgtgtatggttgagtaactcttccggggcgagcgaagtttcaagcgccacggcggcgttgaggtaatcgggttgatcttgcggccccagcggtggggtgcggtaaaacgaagaaacggcaagaatgtggctttcagggatatcgcctaatgctttcagggcagcattgacctgctccagcggagaggccagattgctgcctatggcaatatacgccactgtcatgcggtaccctcacgacgcggtgcgcgtttgcgtggacgacgagtacggcgacgcggtgacggctcttcatccaactcgttaagcatccctttttgatctggtggcgcggaaacctggaactcaccccaccatttcaccagacgctgcagttcagcgttacgctcaacttcagctcgcaaggccaacaggtcataagccgcacggaacttaggatgctccagcagtttccatgcgcgtttaccctgacgacgggacatacgcaactgcaactgccagatatcgcgggttaatgtcgtcagacgtttcgggattgccagtgaacggcaggcttcgtccagcacgtcgttcatcgccagcgcgaaagcgtcgtgataggtcaggccgctttcctgggcgatcttctgtgccgtctccagcagtgggtaccagaacatggcggcaaacaggaacgccgggttcacgcgcatatcgttatggatacgcgtatcggtattcttcagcacctgttcaatgatccgctccatcgggctgtcgccattttccgtgaagtagcgggtaatggtcgggaacagcggctggaacagatgatattcacacaacagcttataggtttcgtaaccgtagcccgcttgtagcagtttaagcgattcttcaaacaggcgtgccggtgggatatcgttcagcagggtagcgaggcgagggatcggttctgcggtttccgggctgatgcgcatacccaatttggcggcaaaacgtaccgcgcgcagcatacgtaccggatcttcacggtagcgcgtttccgggttaccaatcagacggataacgccgtccttcagatccttcatgccgccaacgtaatcacggacggtaaaatccgctacgctgtaatacaggctgttgatagtgaaatcgcggcgctgggcgtcttcttcgatggagccgaaaatgttgtcgcgcagcaacatgccgttttgcccgcgttgggaggtcgtgcggtcgctgatgttaccttcgtggtgtccacggaaggtcgcaacttcgataatctccgggccaaacatcacatgagccagacggaaacggcgacccacaaggcggcagttacggaacagtttgcgcacctgctcaggcgtggcgttagtggttacgtcaaagtctttcggctttttgccaagtaacaggtcgcgcacgccgccgccaaccagccaggcttcgtatcccgctttattgagcctgtacattaccttcagggcattttcactgatatctttgcgggaaatagcatgctgctcacgcgggatcaccgtcacctgtggacgggcgactgcctgttcagcctcgctttcctcgcggcttagcaccttgcggcaaaaattagcgactcgggtaaaaatagtacacctcggtagtgtcaaacatcattcaggacaaaaaaatagcggctaatcatagctcagcatgacgcatttgagaatgttgaatttacaattgctgactcaggcacggcggtaagccgccagtttttgacggctgactggaggatttgctcgacgctgaaatcctgccagtgtgcttctgcctgctgacccagaaattgaagtgccgcgattagtaccgggcgtggatcgcttttcggcaacgcaggcgcatgattctgcttggaaagtttagcgccttgtggattaagcgccagcggcagatgaatgtaatctggcactttccagccaaaaagctggtacagcgagatttgccgcactgtcggttcgatcaaatctgccccgcggacaatttcgctcacgccctggaaatgatcatcaaccaccaccgccaggttataggcaaacaaaccatcacggcgatgaataataaaatcttcccgtgccagtttttcgtcggcgtgaataatgccgcgcagctggtcagtaaattgcgtgaccggatgctgctggcggatacgcactgcggcgttgtctggtccatgatgcaacacccggcaatgaccgtcgtaaataccgccaatgctttgaatacgcgcacgcgtgcaggtgcagtaataacttagcccttgctcatgtaaccaggcgagtgcttcacgataggcgtcgtgacgttgcgattgccagagaacatcgccgtcccagtgcagaccgtaatgttccagctggcgcaggatagtttctgcggcaccgggaacttcacgaggcgggtcgatatcttctatacgtaccagccagcgaccttgccgggcgcgagcctgcaaatagctgccaagcgcagcaatcagagaaccaaaatgaagctcgccggaaggagagggggcgaagcggccaatatagtgtgtgtctgtcatctctttgaacaaaaaataaggcgggagcatttcccgcctgtggtaaacgtgatggaacggctgtaattagccagccatctgtttttcgcgaatttcagccagcgttttgcagtcgatgcacagatcggctgtcgggcgcgcttccagacggcgaataccaatttcaacaccgcaggattcgcagtagccgaaatcttcgtcttccacttttttcagcgtcttctcgatctttttgatcagcttacgctcgcgatcgcggttacgcagttcgaggctgaactcttcttcctgggctgcacggtctaccgggtccgggaagttggctgcttcatcctgcatatgtgtaacggtgcgatcgacttcatccctgagttgattacgccatgcttccagaatacgacggaagtgcgccagctgggcttcattcatatactcttcgcccggcttctcctgatatggttccaccccagcgatggcgagaatactcagggacgatgttttacggttttgcccttcttgcatgttgcttctccttaacacgcactatcgatccccatgttcgggggaaaaatgaggccgctataaatagcagatgcttttccggatagcaattatctaaacgtaacacttgacaactgtgtgaggaaaagcgtatttgcgcacgcgaccagaatgtaaattaaccagttacttactttactacaatgtaaccggcagtgattttttaagagccatgccttcagcagaaatttccgctttgtaagccagaatttctacccccctctgttgagcttctgacaatagttgcgcgtatttctcatcgatgtggcgcgcgggtgaaaaccgtgtaatggctgaatgcagcacggcgaaaaagataaccgcacgctggccttcagccgctacgctcatcaactcccgaaggtgtttctgacctcgttcagtgaccgcatcgggaaaatatccctgttcgttctccgctaacgtaaccgatttcacttcaatatagcagtctggacgcgaatccgcctgcaacataaagtcaatacggctgcgttctgcgccgtattttacttcgcttttcagcgagctatagcctgacagttctgaaattgattcattaaggatagcctctttcgtcaacctgttagcccaaagcgtgttgacgcaaataaatgcgccgctctggctttgagttaattcccaggtgtgtgggtatttccgtttggtgttgtctgaagtcgaataccagacggtatcgccaggcgttgcacaaccggtcatcgcacccgtattcgggcagtgtagcgttaattcgcgaccatcgggtgtgatcacatcggctaaaaaacgtttgtaacgctgaattagcgtcgcgcgctgtagagggggagaaaattccattgcgacaatccttgttattgcgttagcgcccagcgttttagcggcgtgtagcgtgtgcgtccacgggcaaacgaggaggcgtaaagggtgaactccgtcaccgcataagaccagttaaaacccggcggcgggattgtcaccgcctcgctggcgtcgcgcaataaggtaatatgtggatgaaacggacgattgctttgaaaacaaccgctgcgggcagtctgtgaacggagcatattcgccagctggattaagccgcgtggaggctgacgcatccctaaccacaccacacgcgaacgcagccattgtccggcgtcatcaagcgtgagtgtgaaaccaggttgacgaatccgtccggctaaaagagaaagcgccttctctttctcggcgctcacttcgcctaaaaatgccagagtcagatgcaaattatcggcggcgaccggacgtcccgcctcaggtgggaagtgtttggcgcgccagtggataatctgttcgcgaatttctgcaggtaagtcgatagcaaagaacagacgttgcggttcagacatgtgaggcactcggttatgaattaccgcgatgctacaatgtgccgcgaagaatgttaaccctctggagcgttttgtgtcgtcgttgcccgttgctgccgtcttacctgaattacttaccgctctcgattgtgcgccgcagatattattaagtgcgccgaccggagccgggaaatcaacctggctgccgctgcaactgctggcgcatcccggcattaacgggaaaattatcctgctggagccgcgtcgtctggcggcgcgtaacgtcgcgcaacggctggcggagctgcttaacgaaaagccaggcgataccgttggctaccggatgcgtgcgcaaaactgcgtcgggccgaatacccgcctggaagtagttaccgaaggcgtgctgacgcggatgatccagcgtgacccggagttgagcggtgttggattggtgatccttgatgaatttcatgagcgtagcttgcaggcggatttggcgttggcgctgttactcgatgtgcaacaaggtctgcgtgatgaccttaaactgctaattatgtcggctacgctggacaacgaccgcttgcagcaaatgctgccagaagcgcccgtcgtcatctcagaagggcgctcgtttccggttgaacgccgttatttaccgctgcccgcgcatcagcgttttgacgaagccgttgcggtagccaccgccgaaatgctgcgtcaggaaagtggatcattactgttatttttacctggcgtcggagaaattcagcgtgtgcaggaacaactggcttcgcgcatcggcagtgatgtgttgctctgcccgctgtatggcgcgttgtcgctgaacgatcagcgaaaagcgatcctcccggcaccgcaagggatgcgcaaagtggtgctggcgaccaatattgctgaaaccagtttaaccattgaaggtattcgtctggtggtggattgtgcccaggagcgtgtggcgcgttttgatccgcgcacggggcttacgcgactgattactcaacgcgttagccaggcatccatgacgcagcgtgccgggcgcgccgggcgtctggagccgggtatctgcctgcatttaatcgccaaagaacaagcagaacgcgctgccgcgcaaagtgaaccggagatcttacaaagcgatctttccggtttgctgatggaattactgcaatggggatgcagcgatccggcgcagatgagctggctggatcaaccgccagtagtgaatctaatggccgcgaaacgtctgttacaaatgctgggggcgctggacggtgaacggcttagtgcgcaagggcaaaaaatggcagcgctgggtaacgatccgcgtttagcggcaatgctggttagcgcgaagaacgacgacgaagctgctaccgcggcaaaaattgccgccattctcgaagagctgccacggatgggcaatagtgacctgggcgtggcgttttcgcgcaatcaaccagcctggcagcaacgtagtcagcaactgttaaaacgcttaaacgtacgcggcggtgaggcagacagttcgcttatcgcgccgctacttgccggggcgtttgccgatcgcattgctcatcgccgtgggcaagatggacgctatcaactggcaaacggcatgggagcgatgctcgatgccgacgacgcgctaagccgccacgaatggttgatcgcaccgttattattgcagggcagcgcctcgccggatgcgcggattttactggcgctaccggtcgatattgatgaattagtacaacgctgtccgcagctggtgcagcaatctgacaccgtggaatgggatgacgcgcaaggtacgctgaaagcctggcgtcggctgcaaatcggtcagttgacggtgaaagtgcagccgttagcgaaaccgtcagaagacgagttgcatcaggcgatgcttaatggcatccgtgataaaggtttaagcgtgctcaactggacggcggaagcggaacagctacgcttgcgtttgttatgcgccgcaaagtggttgccggaatatgactggcctgcggttgataatgaaagtttgttggcgacgctggaaacgtggctgctgccacatatgaccggcgtgcattcactacgcggcctgaaatcactcgacatttatcaggcactacgcggattacttgattggggaatgcagcaacgtctggatagtgaattgcctgcgcattacactgtgccgacgggaagccggatcgccattcgttatcatgaagataacccgcccgcgctggcggtgagaatgcaggagatgtttggtgaggccaccaatccgacgatcgcccaggggcgcgtgccgctggtgctggagttgctttcccctgcccaaaggccattacaaatcacacgagatttgagcgccttctggaaaggagcgtaccgtgaggtgcaaaaagagatgaaagggcgttatcccaaacatgtctggccggacgacccggcaaacactgcaccgacgcgacggacgaaaaagtattcgtaaggttggttttctccctctccctgtgggagagggccggggtgagggcatcagcgcgcacgttcaccctcaccctaaccctctccctcaagggagaggggaccgatcgagcacaaattttgagagatatcttcttctgtcttgtaacagaagaacagaaaatcgggcttttgcgcctgaatattgcggagaaaaagcatggccgggaatgaccgcgagccaattggacgcaaagggaaaccgacgcgtccggtcaaacaaaaggtaagccgtcgtcgttacgaagatgacgatgattacgacgattatgatgactatgaggatgaagaaccgatgccgcgcaaaggtaagggcaaaggcaaagggcgtaagcctcgtggcaaacgcggctggctatggctactgctaaaactggctatcgtttttgccgtgctgatcgccatttacggcgtttatctcgatcaaaaaattcgtagccgtattgatggcaaggtctggcaactgcctgcggcagtttatggccgaatggtcaatcttgagccagacatgaccatcagcaagaacgagatggtgaagctgctggaggcgacccagtatcgtcaggtgtcgaaaatgacccgtcctggcgaatttaccgtgcaggccaacagcattgagatgattcgccgtccgtttgatttcccggacagtaaagaaggacaggtgcgcgcgcgtctgacctttgatggcgatcatctggcgacgatcgtcaatatggagaacaaccgtcagttcggtttcttccgtcttgatccgcgtctgatcaccatgatctcttcgccaaacggtgagcagcgtctgtttgtgccgcgcagtggtttcccggatttgctggtggatactttgctggcgacagaagaccgtcatttttacgagcatgatggaatcagtctctactcaatcggacgtgcggtgctggcaaacctgaccgccggacgcacggtacagggtgcgagtacgctgacgcaacagctggtgaaaaacctgttcctctccagcgagcgttcttactggcgtaaagcgaacgaagcttacatggcgctgatcatggacgcgcgttacagcaaagaccgtattcttgagctgtatatgaacgaggtgtatctcggtcagagcggcgacaacgaaatccgcggcttcccgctggcaagcttgtattactttggtcgcccggtagaagagctaagcctcgaccagcaggcgctgttagtcggtatggtgaaaggggcgtccatctacaacccgtggcgtaacccaaaactggcgctggagcgacgtaatctggtgctgcgtctgctgcaacagcaacagattattgatcaagaactctatgacatgttgagtgcccgtccgctgggggttcagccgcgcggtggggtgatctctcctcagccagcctttatgcaactggtgcgtcaggagctgcaggcaaaactgggcgataaggtaaaagatctctccggcgtgaagatcttcactacctttgactcggtggcccaggacgcggcagaaaaagccgccgtggaaggcattccggcactgaagaaacagcgtaagttgagcgatcttgaaactgcgattgtggtcgtcgaccgctttagtggtgaagttcgtgcgatggtcggaggttctgagccgcagtttgcgggctacaaccgtgcgatgcaggcgcgtcgttcgattggttcccttgcaaaaccagcgacttatctgacggccttaagccagccgaaaatctatcgtctgaatacgtggattgcggatgcgccaattgcgctgcgtcagccgaatggccaggtctggtcaccgcagaatgatgaccgtcgttatagcgaaagcggcagagtgatgctggtggatgcgttgacccgttcgatgaacgtgccgacggtaaatctggggatggcgctggggctgcctgcggttacggagacctggattaaactgggcgtaccgaaagatcagttgcatccggttccggcaatgctgctgggggcgttgaacttaacgccaatcgaagtggcgcaggcattccagaccatcgccagcggtggtaaccgtgcaccgctttctgcgctgcgttcggtaatcgcggaagatggcaaagtgctgtatcagagcttcccgcaggcggaacgcgctgttccggcgcaggcggcgtatctgacactatggaccatgcagcaggtggtacaacgcggtacgggtcgtcagcttggggcgaaatacccgaacctgcatctggcagggaaaacagggactaccaacaataacgtagatacctggtttgcgggcattgacggcagcacggtgaccatcacctgggtcggccgtgataacaaccagccgaccaaactgtatggtgccagcggggcaatgtcgatttatcagcgttatctggctaaccagacgccaacgccgctgaatcttgttccgccagaagatattgcagatatgggcgtggactacgacggcaactttgtttgcagcggtggcatgcgtatcttgccggtctggaccagcgatccgcaatcgctgtgccagcagagcgagatgcagcagcagccgtcaggcaatccgtttgatcagtcttctcagccgcagcaacagccgcaacagcaacctgctcagcaagagcagaaagacagcgacggtgtagccggttggatcaaggatatgtttggtagtaattaacatctaagcgtgaaataccggatggcgagttgccatccggtaaaataacatcccatctaagatattaaccctttcttttcatctggttgtttattaacccttcaggaacgctcagattgcgtaccgcttgcgaacccgccagcgtttcgaatattatctttataataatcattctcgtttacgttatcattcactttacatcagagatataccaatggcgcgttccaaaactgctcagccaaaacactcactgcgtaaaatcgcagttgtagtagccacagcggttagcggcatgtctgtttatgcacaggcagcggttgaaccgaaagaagacactatcaccgttaccgctgcacctgcgccgcaagaaagcgcatgggggcctgctgcaactattgcggcgcgacagtctgctaccggcactaaaaccgatacgccgattcaaaaagtgccacagtctatttctgttgtgaccgccgaagagatggcgctgcatcagccgaagtcggtaaaagaagcgcttagctacacgccgggtgtctctgttggtacgcgtggcgcatccaacacctatgaccacctgatcattcgcggctttgcggcagaaggccaaagccagaataactatctgaatggcctgaagttgcagggcaacttctataacgatgcggtcattgacccgtatatgctggaacgcgctgaaattatgcgtggcccggtttccgtgctttacggtaaaagcagtcctggcggcctgttgaatatggtcagcaagcgtccgaccaccgaaccgctgaaagaagttcagtttaaagccggtactgacagcctgttccagactggttttgactttagcgattcgttggatgatgacggtgtttactcttatcgcctgaccggtcttgcgcgttctgccaatgcccagcagaaagggtcagaagagcagcgttatgctattgcaccggcgttcacctggcgtccggatgataaaaccaattttaccttcctttcttacttccagaacgagccggaaaccggttattacggctggttgccgaaagagggaaccgttgagccgctgccgaacggtaagcgtctgccgacagactttaatgaaggggcgaagaacaacacctattctcgtaatgagaagatggtcggctacagcttcgatcacgaatttaacgacacctttactgtgcgtcagaacctgcgctttgctgaaaacaaaacctcgcaaaacagcgtttatggttacggcgtctgctccgatccggcgaatgcttacagcaaacagtgtgcggcattagcgccagcggataaaggccattatctggcacgtaaatacgtcgttgatgatgagaagctgcaaaacttctccgttgatacccagttgcagagcaagtttgccactggcgatatcgaccacaccctgctgaccggtgtcgactttatgcgtatgcgtaatgacatcaacgcctggtttggttacgacgactctgtgccactgctcaatctgtacaatccggtgaataccgatttcgacttcaatgccaaagatccggcaaactccggcccttaccgcattctgaataaacagaaacaaacgggcgtttatgttcaggatcaggcgcagtgggataaagtgctggtcaccctgggcggtcgttatgactgggcagatcaagaatctcttaaccgcgttgccgggacgaccgataaacgtgatgacaaacagtttacctggcgtggtggtgttaactacctgtttgataatggtgtaacaccttacttcagctatagcgaatcgtttgaaccttcttcgcaagttgggaaggatggtaatattttcgcaccgtctaaaggtaagcagtatgaagtcggcgtgaaatatgtaccggaagatcgtccgattgtagttactggtgccgtgtataatctcactaaaaccaacaacctgatggcggaccctgagggttccttcttctcggttgaaggtggcgagatccgcgcacgtggcgtagaaatcgaagcgaaagcggcgctgtcggcgagtgttaacgtagtcggttcttatacttacaccgatgcggaatacaccaccgatactacctataaaggcaatacgcctgcacaggtgccaaaacacatggcttcgctgtgggctgactataccttctttgacggtccgctttcaggtctgacgctgggcaccggtggtcgttatactggctccagctatggtgatccggctaactcctttaaagtgggaagttatacggtcgtggatgcgttagtgcgttatgatctggcgcgagtcggcatggcgggctccaacgtggcgctgcatgttaacaacctgttcgatcgtgaatacgtcgccagctgctttaacacttatggctgcttctggggcgcagaacgtcaggtcgttgcaaccgcaaccttccgtttctaatttctcttttggggcacggatttccgtgcccatttcacaagttggctgttatgcaggaatacacgaatcattccgataccacttttgcactgcgtaatatctcctttcgtgtgcccgggcgcacgcttttgcatccgctgtcgttaacctttcctgccgggaaagtgaccggtctgattggtcacaacggttctggtaaatccactctgctcaaaatgcttggccgtcatcagcctccgtcagaaggggagattcttcttgatgcccagccgctggaaagctggagcagcaaagcgtttgcccgcaaagtggcttatttgccgcagcagcttcctccggcagaagggatgaccgtgcgtgaactggtggcgattggtcgttacccgtggcatggcgcgctggggcgctttggggcggcagatcgcgaaaaagttgaggaagctatctcgctggttggcttaaaaccgctggcgcatcggctggtcgatagtctctctggcggcgaacgtcagcgggcgtggatcgccatgctggtggcgcaggatagccgttgtctgttgctcgacgagccaacctcggcgctggatatcgctcaccaggttgatgtgctggcactggtgcatcgtttaagtcaggaacgtggcctgacggtcattgccgtgctgcacgatatcaatatggctgcgcgttactgtgattatctggtcgccctgcgcggcggtgaaatgattgctcagggaacgcctgcggaaattatgcgcggcgaaaccctcgaaatgatttatggcatcccgatgggtattttgccgcatccggcgggtgctgcacctgtgagttttgtttattgatgagcggcttacctcttatttcgcgccgtcgactgttaacggcgatggcgctttctccgttgttatggcagatgaataccgcccacgcggcggctattgatcccaatcgtattgtggcgctggagtggttgccggtggaattactgctggcgctcggcatcgtgccttacggcgtggcggataccatcaactatcgcctgtgggtcagcgaaccaccattgccggactcagtgatcgacgtcggtttgcgcacagaacctaaccttgaactgctgaccgaaatgaaaccgtcgtttatggtctggtcggcaggatatggcccttcaccagaaatgctggctcgtattgcgccggggcgtggatttaacttcagcgatggcaaacagccgctggcgatggcgcgtaagtcactgacggaaatggcagatttacttaacctgcaaagcgcagcagaaacgcatttagcgcactatgaagactttatccgcagcatgaaaccccgctttgtgaagcgtggtgaacgcccgttattgctgacgacgcttatcgatccgcgccatatgctggttttcggtccaaacagcttgtttcaggaaattcttgatgagtacggcatcccaaatgcctggcaaggggaaaccaacttctggggcagtaccgccgtcagcatcgatcgtctggcggcgtataaagatgttgatgtgctctgttttgatcacgacaacagcaaagacatggacgcgctaatggcaaccccgctgtggcaggccatgccgtttgtccgcgccggacgctttcagcgcgtacccgcagtctggttttatggtgcgacgctctcggcaatgcactttgtgcgcgttctggataacgccatcggaggtaaagcgtgagtaaacgaattgcgctttttccggcgttattgctggcgctgctggtgattgtcgctacggcgctgacctggatgaacttttcgcaggcgctgccgcgtagccagtgggcgcaggccgcctggtcgccggatattaacgtcatcgagcagatgatttttcactacagcttgttaccacgtctggcgatttctctactggtgggcgcgggcctggggctggtgggcgtgctgtttcagcaagtgctgcgtaacccgctggcggaaccgacgacgttgggcgttgctacaggcgcgcaactggggattaccgtcaccacgctctgggcgatccccggtgctatggcgagccagtttgctgcgctggcaggggcttgcgttgttggcttaattgtctttggcgtcgcgtgggggaaacggctttcgccggttacgctgattctcgcggggctggtagtgagcctttattgtggggcaatcaatcagttactggttatcttccatcatgaccagttgcaaagcatgtttctgtggagcactggaacgctgacgcaaaccgactggggcggtgttgagcgtttatggccgcagttgctgggcggtgtgatgctgacgttgctgctacttcgtccgttaaccctgatggggcttgatgatggcgtggcgcgcaatctcgggctggccttgtcgctcgcgcgtctggcggcgctgtcgctggcgatagtcatcagtgcgctgctggtgaacgcagtggggattatcggctttatcgggttgttcgcgccactgctggcaaaaatgctgggggcgcggcgtttgttgccacggttgatgctggcgtcgctgattggtgcgttaattctgtggctttctgatcaaatcatcctctggctgactcgcgtgtggatggaagtttccaccggttcggtcactgcgttgatcggtgcgccgctgctactgtggctgctgccgcgtttacgcagcattagcgcgccggatatgaaggtcaacgatcgtgtcgcgactgaacgccaacatgtgctggcgtttgccctcgcgggcggcgtgctgctgttgatggctgtggtagtggcgctgtcgtttggtcgtgatgcgcacggctggacgtgggcgagcggggcgttgctcgaggatttaatgccctggcgctggccgcgaattatggcggcgctgtttgcgggcgtcatgctggcggtggcgggctgtattattcagcggctgaccggaaacccgatggcaagcccggaagtgctggggattagctccggcgcggcgtttggcgtggtgttaatgctgtttctggtgccgggtaatgcctttggctggctgttacctgcaggcagtctcggcgcggcggtgacgctgttgatcattatgatcgccgccggccgcggtggattttccccacaccgcatgttactggcggggatggcgttaagcaccgcgttcaccatgcttttgatgatgttgcaggcaagtggtgacccgcgaatggcgcaagtgctgacctggatttccggttcgacctacaacgcgaccgatgcgcaggtctggcgcaccggaattgtgatggtgattttgctggcgattaccccgctgtgccgccgctggctgaccattttaccgctgggtggtgataccgcccgagccgtaggaatggcgctgacgccgacgcgaattgcgctgctgctgttagcggcttgcctgacggcgaccgcgacgatgactattggaccgttgagttttgttggtttaatggcaccgcatattgcgcggatgatgggctttcgacggacgatgccacacatcgtaatttcggcgctggtgggtggtttactgctggtgttcgctgactggtgtgggcggatggtgctgtttccattccagatcccggcggggctgctgtcaacctttatcggcgcgccatattttatctatttgttgagaaagcagagccgttaatttttccatataacggccctgtacgcctggacggataaagcgtttacgcgacaacggatgcccgatgcgacgctggcgcgtcttatcgggcctacaaacggccccgaatcgtaggtcggataaggcgttcacgccgcatccgacaaaccatgctggatcacaacttcgcaaacacccgacgtgcagcatcgatggtgttattgatatcttccatgctgtgcgccacggacataaagcccgcttcaaacgctgacggtgccaggtaaacaccttcgtccagcatcatatggaagaaacgcttaaagcgttccacgtcacaggccatcacatcctgatagcacgtcacggactcggcgtcggtaaagaaaataccgaacatgccgccaacgtggttaacgaccagcggaattccggcttcttctgccgcttccagcagaccttctgccagacgtgttgtcagctcatccagcgtttcgtgaacgcccggctgcgcgacttcattcagacaggcgaaacccgctgccatcgcaatcgggttaccggaaagcgtacccgcctgatagaccggacccgtcggggccagcgcatccattacatcacgacgaccaccgaatgcgcctaccggcattccaccgccgatgattttgccgaggcaggttaaatctggcactacgccgtaataatcctgtgcgccagctagcgctacgcggaaaccggtcatcacttcatcgatgatcagcaacgcgccaaattcgtcgcacagcgcgcgcagacctggcaggaagtctggcagcggtggaacacagttcatattgcctgccaccggctcgacgataatacaggcaatctcttgcgggtattgctcaaatgcggcgcgtacagaagccagatcgttataagtacaggttaaggtatgtttggcgaaatctgccggaacgcccggcgagtttggctgacctaacgtgagtgcgccagaaccggctttcaccagcaggcagtcagcgtgaccgtggtagcatccttcaaatttaataattttgtcgcgaccggtaaaaccacgggccagacggatggcgctcatcgtcgcctcggtgccggagttcaccatgcgcaccatatccatggtcgggaccagttcggtcaccagttgcgccattttcacttccatttcggttggtgcaccaaagcttaaaccacgctcggcggcttcaatcacggcattgcggattgccggatggttatggcccagcaccatcggcccccaggaaccgacataatcgatataggctttgccatcaacatcgtacagataagcgccgtccgctttttcgataaacagtggagtgccgcccacgccagtaaaggcgcgaacaggggagttcacaccgccagggatcagctcgcgcgctgcgctgtaaagattttcagacttactcatggagggttcctgattcgtagaaaaagtgaatggctgctattctatgttattcataacaagttaaatactcgtcaaacatcaggctgcttgtactggtgcaatcctgatttcttagagtataaaagttttgtgcatttgaaacattacgctttgcaaaggattttcatggaacgtgcgagtaaaatgccgtcatcttatttgtatgaccaataagtgatcattggatgaaaactgatactccctctttagaaacaccgcaggccgcgcgcctgcgacgcagacaactgattcgccaacttcttgagcgcgataaaaccccgttagccattttgtttatggcggcagtcgtcggcacgcttgttgggctggcagcggttgcttttgacaaaggtgtcgcctggttgcagaaccaacgtatgggggcgctggtacatactgctgataattatccgcttctgttaaccgtcgcttttctctgttcggcggtgctggcgatgtttggctactttttggtgcgcaaatacgcgccggaagcaggtggttcggggatcccggaaattgaaggggcgctggaagatcaacgtcccgttcgctggtggcgtgtattgccggtgaagttctttggcgggctggggacactcggcggaggcatggtgttggggcgcgaagggccaaccgtgcagatcggcggtaacattggccgtatggtgcttgatattttccgcctgaaaggtgacgaagctcgccatacgctgctggcaaccggtgctgctgcggggctggcggcggcctttaacgcgccgctggcgggtattttgtttattatcgaagagatgcgtccgcagtttcgctatacgttaatttcgattaaagcggtatttattggtgtcattatgtcgaccattatgtaccggatttttaatcatgaagttgcgttgattgacgtcggtaaactttctgatgcgccgcttaatacgctgtggctttatctgatcctcggtattatttttggcattttcggccctatttttaataaatgggtgctggggatgcaggatttgctgcaccgtgtgcacggcggcaatattaccaaatgggtgctaatgggcggtgcgattggcggtctgtgtggattgctggggtttgtggcaccagcaacgtcgggcggcggttttaacctgattcctatcgctaccgcggggaatttcagcatgggaatgctggtgtttatcttcgtcgcgcgggtcattaccaccttactctgcttctcttccggcgcgccgggcggtatttttgccccgatgctggcgctgggtactgtgctgggaaccgctttcggaatggttgccgttgagctgtttccgcaatatcaccttgaggcggggacgtttgctattgccggaatgggggcattactggcggcatctattcgcgcgccgttaacggggatcattctggttctggagatgaccgataactaccagctcattttgccaatgattattaccggtcttggcgcaacactattagcgcaatttaccggcgggaaaccgctatactcggcgattcttgcgcgcacgctggcaaaacaggaagctgagcaactggcgcgaagcaaggccgcatcagccagcgagaatacttgaacgaaataccagggtattagataatggcgattattattgggttagaatttgcccaattgccgatgtcgtttggagcaaaatatgagtgatgacgtagcactgccgctggagtttaccgacgcagcagccaacaaagttaaaagcctgatcgctgacgaagataacccgaatctgaaattacgcgtgtatatcaccggtggcggttgcagcggcttccagtatggtttcacctttgatgatcaggtgaacgaaggcgatatgaccatcgaaaaacagggcgttggcctggtggttgatccgatgagcctgcaatatctggtcggcggttccgttgattataccgaaggtctggaaggttctcgtttcatcgtgaccaacccgaacgcgaaaagcacctgcggttgcggttcttcctttagtatctaatctgttgttcatgtgccggataaactatccggcacatcttctctcttcaacgcccattctcatccagcgcaaacgtcggtagcttaagatgccaacgaatagccgccagccgaatcaatagcgtcacgaccatgcccatcatactggctgtttccagtggtacggaaaatgtgtaataagccgtagcgtggacaataccgccgataatacaggcagttgcgtagatttctgtacgtaaaatcatggggatttcgcgggccagaacatcacgaatgatcccgccgccaacgccagtaatgacgcccatacaaaccgcgattaacggaccggcttccgcattaaaggctttattcacgccaatgccgacaaacaccgccagaccaacggcgtccagcaccggcaacatccattttggtaagcgtcttggctggcgcaccagcacgatggtcagcatgctggtgaccattgcaacgaccagatcggtgggatctttcacccaaaataccgggccgtgatccagcgccatgtcgcgaattgtcccgccgcctactgcggttaccacgcccagtaccagaacaccaaaagggtccatacgcaattttccggctaacaaaacgccggagatggcaaataccgctgtgccgactatatccagccaatagacgagcattgttcaatccccactgagcacctgaaaaggtcaggcgctaatctacctgtgaaagcgcattacagagctgttgtgcagcgaggataatacgtgggcttgcacgttcaaaccagtcactcgtgagaggaataacgggaattttgagctgttcaccccagtattgtttgattttaggaatttggtccggtccgcctgtaatgacaatcgcctgtggcgagcgtgctaacacctgttcgcggctaacttgcggccagggaacccggctgtctttaaagatgttttctccgccacaaacttcgagtacctggttctgaatcgactcttttccactggtaaatggcggattaatgccgaattgcagaaaaacacgttttttaggtttatcagcatattgcgctttcaattgcgcgtactgatccagcagggattgcgcggcttgttcggccttgtctggttgcggactccagggggccagttgacgtaacgcattggcaatttgttcaatgcttgtcgcatcgacccacatcacttttattcccagcgaagccagctggtcaacctgccgctcggcattacctccacgccaggcaatcaccagatcgggtttcagcgcgacaatgcgttccagattcatcccctgccaggtggaaacctgctcaatcttttgcgcttgtggaggatagtcggaatagctgctgaccccaaccggcgtgatcccggcggcaaaggcaagttcagtgttggcgggagaaagcgtgatgacgcgcggcgcggcgttgagccacagtggcgcaagaaaagacagggcgaccagcgccctgaacagtgacttagccatgtgcaagtttctgcaccagtgactcaaccatcaggctggactgtttagcggcaacagccaggaactcatcgaagctaagatgagactgttgatcggccacgtcggagatggcgcgtactacgacaaacgggacgttgaaattgtggcagacatgggcgattgccgtcgcttccatctctacagcaatggcctgtgggaagttgtggcggattttcgccagaccaacagaaccgttgatgaaagcgtcgccgctaacaatcaggccacgtacagcgttaagattcagttcggcaatgcaggcctcagcggcagcgatcagtttatcgtcagctttaaagcctgccggacagcctggtaactgaccgtattcataaccaaatgccgtgacatccgcgtcgtgataacgtgcttcgtccgagacaacgatatcgcccactttcaacgttggtgccaggccaccggcagaaccggtgttaataatcacatctggcttgcagtgttccaacagcagagtggcacccagcgccgcagcgactttaccgatgcccgatttcagaagcgcaacctcggttccattcagttggccggtatagatttcgcaaccgccgagactgatagtttgacggttttcgattttgtcacgcagcagcgtaacttcttcttccattgcaccaatgatgccgattttcatagatttactcgcgataagcccgatttgaaggcatagtttaccatgcgcttacggggaagcgtatttctcacgcgggagaggacatggcacagattgatttccgaaaaaaaataaactggcatcgtcgttaccgttcaccgcagggcgttaaaaccgaacatgagatcctgcggatcttcgagagcgatcgcgggcgtatcatcaactctccggcaattcgtcgtctgcaacaaaagacccaggtttttccactggagcgcaatgccgccgtgcgcacgcgtcttacccactcgatggaagtccagcaggtgggacgctacatcgccaaagaaattttaagccgtctgaaagagcttaaattgctggaagcatacggcctggatgaactgaccggcccctttgaaagcattgttgagatgtcatgcctgatgcacgatatcggcaatccgccgtttggtcattttggcgaagcagcgataaatgactggtttcgccaacgtttgcacccggaagatgccgaaagccagcctctgactgacgatcgctgcagcgtggcggcactacgtttacgggacggggaagaaccgcttaacgagctgcggcgcaagattcgtcaggacttatgtcattttgaggggaatgcacaaggcattcgtctggtgcatacattgatgcggatgaatctcacctgggcacaggttggcggtattttaaaatatacccgtccggcgtggtggcgtggcgaaacgcctgagacacatcactatttaatgaaaaagccgggttattatctttctgaagaagcctatattgcgcggttgcgtaaagaacttaatttggcgctttacagtcgttttccattaacgtggattatggaagctgccgacgacatctcctattgtgtggcagaccttgaagatgcggtagagaaaagaatatttaccgttgagcagctttatcatcatttgcacgaagcgtggggccagcatgagaaaggttcgctcttttcgctagtggttgaaaatgcctgggaaaaatcacgctcaaatagtttaagccgcagtacggaagatcagttttttatgtatttacgagtaaacaccctaaataaactggtaccctacgcggcacaacgatttattgataatctgcctgcgattttcgccggaacgtttaatcatgcattattggaagatgccagcgaatgcagcgatcttcttaagctatataaaaatgtcgctgtaaaacatgtgtttagccatccagatgtcgagcagcttgaattgcagggctatcgggtcattagcggattattagagatttatcgtcctttattaagcctgtcgttatcagactttactgaactggtagaaaaagaacgggtgaaacgtttccctattgaatcgcgcttattccacaaactctcgacgcgccatcggctggcctatgtcgaggctgtcagtaaattaccgtcagattctcctgagtttccgctatgggaatattattaccgttgccgcctgctgcaggattatatcagcggtatgaccgacctctatgcgtgggatgaataccgacgtctgatggccgtagaacaataaccaggcttttgtaaagacgaacaataaatttttaccttttgcagaaactttagttcggaacttcaggctataaaacgaatctgaagaacacagcaattttgcgttatctgttaatcgagactgaaatacatgaaaaaaaccacattagcactgagtgcactggctctgagtttaggtttggcgttatctccgctctctgcaacggcggctgagacttcttcagcaacgacagcccagcagatgccaagccttgcaccgatgctcgaaaaggtgatgccttcagtggtcagcattaacgtagaaggtagcacaaccgttaatacgccgcgtatgccgcgtaatttccagcagttcttcggtgatgattctccgttctgccaggaaggttctccgttccagagctctccgttctgccagggtggccagggcggtaatggtggcggccagcaacagaaattcatggcgctgggttccggcgtcatcattgatgccgataaaggctatgtcgtcaccaacaaccacgttgttgataacgcgacggtcattaaagttcaactgagcgatggccgtaagttcgacgcgaagatggttggcaaagatccgcgctctgatatcgcgctgatccaaatccagaacccgaaaaacctgaccgcaattaagatggcggattctgatgcactgcgcgtgggtgattacaccgtagcgattggtaacccgtttggtctgggcgagacggtaacttccgggattgtctctgcgctggggcgtagcggcctgaatgccgaaaactacgaaaacttcatccagaccgatgcagcgatcaaccgtggtaactccggtggtgcgctggttaacctgaacggcgaactgatcggtatcaacaccgcgatcctcgcaccggacggcggcaacatcggtatcggttttgctatcccgagtaacatggtgaaaaacctgacctcgcagatggtggaatacggccaggtgaaacgcggtgagctgggtattatggggactgagctgaactccgaactggcgaaagcgatgaaagttgacgcccagcgcggtgctttcgtaagccaggttctgcctaattcctccgctgcaaaagcgggcattaaagcgggtgatgtgatcacctcactgaacggtaagccgatcagcagctttgccgcactgcgtgctcaggtgggtactatgccggtaggcagcaaactgaccctgggcttactgcgcgacggtaagcaggttaacgtgaacctggaactgcagcagagcagccagaatcaggttgattccagctccatcttcaacggcattgaaggcgctgagatgagcaacaaaggcaaagatcagggcgtggtagtgaacaacgtgaaaacgggcactccggctgcgcagatcggcctgaagaaaggtgatgtgattattggcgcgaaccagcaggcagtgaaaaacatcgctgaactgcgtaaagttctcgacagcaaaccgtctgtgctggcactcaacattcagcgcggcgacagcaccatctacctgttaatgcagtaatctccctcaaccccttcctgaaaacgggaaggggttctccttacaatctgtgaacttcaccacaactccatacatcttcatcatcctttaggcatttgcacaatgccgtacgttacgtacttccttatgctaagccgtgcataacggaggacttatggctggctggcatcttgataccaaaatggcgcaggatatcgtggcacgtaccatgcgcatcatcgataccaatatcaacgtaatggatgcccgtgggcgaattatcggcagcggcgatcgtgagcgtattggtgaattgcacgaaggtgcattgctggtactttcacagggacgagtcgtcgatatcgatgacgcggtagcacgtcatctgcacggtgtgcggcaggggattaatctaccgttacggctggaaggtgaaattgtcggcgtaattggcctgacaggtgaaccagagaatctgcgtaaatatggcgaactggtctgcatgacggctgaaatgatgctggaacagtcgcggttgatgcacttgttggcgcaggatagccgtttgcgggaagaactggtgatgaacctgattcaggcagaggagaatactccctcacttactgaatgggcgcaacggctggggatcgatctcaatcaaccgcgagtggtggctattgttgaggtcgacagcggtcagcttggcgtggacagcgcaatggcggagttacaacaactgcaaaacgcgctgactacgcccgagcgtaataatctggtggcgattgtctcgctaaccgaaatggtggtgttgaaaccggcgttgaactcttttgggcgctgggatgcagaagatcatcgtaagcgagttgaacaactgattacccgcatgaaagagtacggccagctgcgttttcgcgtttcactgggcaactattttaccggtcctggcagtattgcccgatcctatcgtacggcgaaaacgacgatggtggtgggtaaacagcggatgccagaaagtcgctgctatttttatcaggatctgatgttacctgtgttactcgacagtttgcgtggcgactggcaggccaacgaactggcgcgaccgctggcgcggctgaaaacgatggacaataacggcttgctgcgacgaacgctggcggcgtggtttcgccacaatgtgcaaccgctggcaacgtcaaaggcgttgtttattcatcgtaataccctggagtatcggcttaatcgtatatcggaactgaccgggcttgatttgggcaattttgatgacaggttgctgctgtatgtggcgttacaactggatgaagagcggtaggttatgcgttaaggttgaggcggcgctggctcattcccctcagcccgaagggtagaggggaatgcccgaattaaccgtcagttcgggattatttacgcgttagtttttccagatcggcttcaatctcgctgatcttattggttacgactgactccaggtgacgtaagtcgtcgaggatcttacgcttaagatcaacttcgctgcggtcacgctggcagatttgatcaagctcatcaatgatataccgtagattcgggctgatttcctggacttctttataaccctgacccacaccatcagcgacgaccgttttacgctgacgcggatatttaaacttaacgctcttggcgaaaaactcgcctttgtctttctggaaatagattttcagaatatcgttgttggcttcctgccggaggctgtaacgatcaatttcttcaggattggtaatacccagacttttcagattgtcgtacatagcgttacctcaaaatgagtcagtaaattgtgcttattttagcatttggcctggcccgcccggctcgactgtgatcgcagaaagcctttttcttccagacttctatcatgacgtaaaaatcaaaaaattacctgctttattctggtgataaaattcacgatctacaccagttccagcatcgttacttccgggcggcagttcagacgcaaaccatacaaactgcccacgccacgggttgtgtagatgtgtctttcgccaaaggcatttaatccggcgacgtaacgtttatcttcgacaggggcaaaaggttcaccaaccaacggtacgcgcagttgcccgccgtgagtatggccgcacagcatcagatcccagggttcatcacgcatgacttctttgctgtcgggattatgcgccagcaccagtcttggcagattggcttcgctggcgggaggcggtttgcattgtccggcccataagtcaccagtgcctaccagttcgaattgcctgttcggcgtggcgatcaccgtagcctggttaaacaacaccgtgatgcccgctgatttcaacgtctcgccaattaagtgatttttttctgtaccaacagggcgatcgtggttgccgaagcaggcaaacgtcggcgcacattcggcaaggggggagagtacgtcactaaacgccgaaaaattcagcgacatatcaaataatacgtaatcgccgcccagtaatatcaaatcgggcttttgttctatgccaagagcaatcgcgtcagaaatcaggcttaaaggaacaaaacgagagtaatggagatcggccagaaaaagaattttgaatggtgctgcgttgtctttaaaaaaggcgaggcggtgacggattaattcaaaccagcctggctcacagtaatgcatataaccgaaacctgagctcgtggctatcgtcgcggcagtagcctgcaaaaatcggcggcgtgaaatcatcgctcatccctgcaaaaaaatcgggcagcgtcgtgctgcccgtgtgcatacttttagtcgatggtacgcagcagttcgttaatgccgactttgccgcgagttttcgcgtcaactttcttaacgataaccgcacagtagaggctgtatttgccatcttttgacggcagattacctgaaacaaccacagaccccgccggaacgcgaccgtagtggatttcgccggtttcacggtcgtaaatacgggtgctctgaccaatgtatacgcccatggaaatgacggaaccttcttcgacaatcaccccttcaaccacttcagagcgcgcgccgatgaagcaattatcttcaatgatggttgggttagcctgcagcggttccagcacgccgccgatgcccacgccaccggaaaggtggacgtttttaccaatctgcgcacaagaaccgacggtcgcccaggtatcaaccatggtgccttcatcaacatatgcgccgatgttgacgtaagacggcatcagcacggtgttacgggcaataaacgcaccctgacgtaccgccgctggtggcacaacgcggaagccttctttctggaaacgtgcttcgtcgtagtcggcgaatttcatcggcactttgtcgaagtagcggctttctgccccttcgatcacctgattatcattaatacggaaagagagcagcaccgcttttttcaaccactgatgcgtcacccactgaccgtcaattttttccgctacacgcagtgcgccggaatccagcagggcgatcacctgatttaccgcttcgcgggtaacggtgtctgcattggctggcgtgatctcggcacggcgttcaaaagcggtttcaataatgttctgtaactgctgcattgttaaactcttttcatatcagtaaacacatcaccctttatcgtttggattgagggcctctgtcaaccgctgatgcacttcctgctgcaactcgttattaagcgcacgccggtcagcggtggcaattatgaataaatcttctactcgctcgccaatggttgtaattcgggcaccatgaagcgaaattcccagatcggcaaaaattttcccgactcgcgccagcagtccaggttggtcgagggcgatcagttcgaggaacgatttgcggtcggtatgggtcggcaaaaacgttacttcggtttcaacagtaaaatggcgtaatttggcgggttggcgacggggctgcggtggctgccagctactttgcgtcagtacttgctccagaccaaaccgaataacctcatgacgatctgcggacagcgggttgccatcgggttccagcacgataaaggtatccatcgccataccgtcgcgagtggtgaaaatttgtgcgtcgtgaacacttaaattgcggcggtctaattcggcacagacggcggcaaacagataagggcggtccgggctccagataaaaatctcggtgcctccacgcgtagcctgcgggctaagcaataccagcggtttgcttaaatcatgctgtaataaatggcgggcatgccaggccagttgatttgggctatggcggacaaaatagttagcacgacagcgtgaccaaatttggtgcagcgcctcttcgtcgatgttatccatgcgcagtagtgccagtgcctggagttggtgatggcgaacccgttcgcgcatatccggcgtgttttgcattccgcgtcgtagctgcttttcggtggcaaagtagagctcacgcaacagactttgcttccagctattccacagcgtttcgttggtggcgcaaatgtcagccacagtcaggcataccagatagcgcagacgattttccgtttgcacttcttcggcaaactgcttgatgacttccgggtcctgaatatcgcggcgttgggcggtcaccgacatcaacaggtgctggcgaaccagccaggcgaccagctgtgtttcgcgtgagttcagcccgtggagttcggcaaaatgcactacatcctgagcaccgagaatggagtggtcgccgccgcgtcctttggcgatatcgtgaaacagcgcggcgatgaaaatcagctcagttgacggcaggcgcggccagacgtccacacacaacggatggcgctggcgcgtttcttcactggcaaaactctccagtttcagcatcacgcggatagtatgttcatccaccgtgtaggcgtggaacagatcaaactgcatctgcccgacgatatgcgaccattgcggcatatacgcgccgagcacgctatggcgatgcattggcaatagcccgcgccgcaccgctccggggtgacgcagaatgctcaaaaacagttttcgtgcttccggaatattacacagcggttgttgcagatggcgacgggcatggcgtaactggcgcagcgtggtggagtaaatgccggtgatcgcactgttgtgcaccatggtgtagaacatacgcaagatggcttccggctggcgcataaatagtgtttcatcacgcaggtcgattagcgtaccgcgtagctgaaactcatcgtcgattggacgtggtttttcgtcggcgggaagggcgaggatggcttcatcgaacagttgcagcagcatctggttgagttcactgacgcggcgtgtaacgcggaagtaatccttcatcatccgctcgaccggttcgttaccttcaccactgtaattcagacgctgggcgacgctaagctggcgatcgaataacaggcgattatcgtaacggctgacgaccagatgcagggcaaagcgaatacgccacaatatatgcagacattcgtttaattccgcccgctccgctgaggttaagaagccaaacccgaccatttcatccagcgatgttgcgccaaaatgacggcgggccacccattgcagagtgtggatatcgcgcaagccgccagggctgcttttgatgtctggttcaaggttgtagctggtgccatggtaacgctgatggcgctggttctgttcttcaactttcgccgcgtagaacttgtcggaaggccagaatccttcgctgaaaatatgtttttgcagttcgaggaacagcgcaacatcgccaattaataagcgggattcgattaaattggtggcgacggttaaatccgataacccttccagcatgcactcttcaagcgtgcgcacgctatgaccgacttccagctttacatcccagagcagcgttaacagctcgcccactttttgcgcctgatcgtccgggagctttttacggcttaaaatcagtaaatcgacgtctgaaagtggatgcagctcgccacgaccgtagccaccgacggcgaccaatgccaggtcggcaatctggctgaatcccgcttcaatccataatcgttgcaggagctggtcgataaactcggtgcgcgcctcaatcaactgttctgcagagatcccattgtcaaaggcatcacccagccaacgctggaaagtatcgatatgggcttttatcccaccgacggttaattcatcacggggccagacgcatggattttgcggttgaccgggcagggtggggagagcggtgtttgcgtactgttctggaagggtattcattgtgcgccacccataagattaaattatcgcattaaaaaagccggcattcgccggcttcatcttattcgtcgtgcgagattatcgccgggatggtgtcatccttgcgtagcgtcagaatttcgcagccgttatcagtcaccacaatagtatgctcatattgtgcagacaagctgcgatctttggtttttaccgtccagccatctttcatggtgcggatctcttttttacccgcgttgaccattggctcgatggtgaacgtcatcccaggtttcagtacgacgttggtttcacgggagtcatagtgcagcacctgcggttcttcatggaagccgcgaccaataccgtgtccgcaatattcacgaacgacggagaagccttctgcttcgacaaatttctgaatcgccgcaccgatttcgcgcagattaatgcctggttttaccatgcgtagcgccaggtacaggctttcttgcgtgatgcggcacagacgttcgcccatgatggtcggcttaccgacgataaacattttcgaggtatcgccgtggaaaccatctttgattacggtgacatcaatgttaacgatatcgccatctttcagcagcttagcatcgtccgggataccgtggcacaccacttcattaatagagatgcaaacggatttcggatagccgtgatagccgaggcaggcagaaaccgcgtgttgttcattaacaatgtaatcattacagatgcgatccagctcgccggtgctgacgcccggtttaacatacggttcgatcatctccagcacttcggcagccagtcggccagcgacgcgcattttttcgatatcttctggggtcttgattgagatagccattaattctgtccatcagcgtcggtgataccgacaatatatatgtaagtgccgtcaatggtatcacacccgggcaaattgagaatcattctgaatttcgccaaacgtgccactgaaggttttctataatagaaaattcaacgtctgatgctgtacacagcgccaacaattattggtgtccacgacgtatttgtggtataaagcgcgccggacttccgatccatttcgtatacacagactggacggaagcgacaatctcactttgtgtaacaacacacacgtatcggcacatattccggggtgccctttggggtcggtaatatgggatacgtggaggcataaccccaacttttatatagaggttttaatcatggcaactgtttccatgcgcgacatgctcaaggctggtgttcacttcggtcaccagacccgttactggaacccgaaaatgaagccgttcatcttcggtgcgcgtaacaaagttcacatcatcaaccttgagaaaactgtaccgatgttcaacgaagctctggctgaactgaacaagattgcttctcgcaaaggtaaaatccttttcgttggtactaaacgcgctgcaagcgaagcggtgaaagacgctgctctgagctgcgaccagttcttcgtgaaccatcgctggctgggcggtatgctgactaactggaaaaccgttcgtcagtccatcaaacgtctgaaagacctggaaactcagtctcaggacggtactttcgacaagctgaccaagaaagaagcgctgatgcgcactcgtgagctggagaaactggaaaacagcctgggcggtatcaaagacatgggcggtctgccggacgctctgtttgtaatcgatgctgaccacgaacacattgctatcaaagaagcaaacaacctgggtattccggtatttgctatcgttgataccaactctgatccggacggtgttgacttcgttatcccgggtaacgacgacgcaatccgtgctgtgaccctgtacctgggcgctgttgctgcaaccgtacgtgaaggccgttctcaggatctggcttcccaggcggaagaaagcttcgtagaagctgagtaataaggcttgataactcccccaaaatagttcgagttgcagaaaggcggcaagctcgagaattcccgggagcttacatcagtaagtgaccgggatgagcgagcgaagacaacgcatctgcggcgcgaaatatgaagggggagagcccttatagaccaggtagtacacgtttggttagggggcctgcatatggccccctttttcacttttatatctgtgcggtttaatgccgggcagatcacatctccgaggattttagaatggctgaaattaccgcatccctggtaaaagagctgcgtgagcgtactggcgcaggcatgatggattgcaaaaaagcactgactgaagctaacggcgacatcgagctggcaatcgaaaacatgcgtaagtccggtgctattaaagcagcgaaaaaagcaggcaacgttgctgctgacggcgtgatcaaaaccaaaatcgacggcaactacggcatcattctggaagttaactgccagactgacttcgttgcaaaagacgctggtttccaggcgttcgcagacaaagttctggacgcagctgttgctggcaaaatcactgacgttgaagttctgaaagcacagttcgaagaagaacgtgttgcgctggtagcgaaaattggtgaaaacatcaacattcgccgcgttgctgcgctggaaggcgacgttctgggttcttatcagcacggtgcgcgtatcggcgttctggttgctgctaaaggcgctgacgaagagctggttaaacacatcgctatgcacgttgctgcaagcaagccagaattcatcaaaccggaagacgtatccgctgaagtggtagaaaaagaataccaggtacagctggatatcgcgatgcagtctggtaagccgaaagaaatcgcagagaaaatggttgaaggccgcatgaagaaattcaccggcgaagtttctctgaccggtcagccgttcgttatggaaccaagcaaaactgttggtcagctgctgaaagagcataacgctgaagtgactggcttcatccgcttcgaagtgggtgaaggcatcgagaaagttgagactgactttgcagcagaagttgctgcgatgtccaagcagtcttaattatcgaaaaggagccgcctgagggcggcttctttttgtgcccatcttgtaaattcagctaacccttgtggggctgcgctgaaaagcgacgtacaatgtcgctagtattaattcatttcaatcgttgacagtctcaggaaagaaacatggctaccaatgcaaaacccgtctataaacgcattctgcttaagttgagtggcgaagctctgcagggcactgaaggcttcggtattgatgcaagcatactggatcgtatggctcaggaaatcaaagaactggttgaactgggtattcaggttggtgtggtgattggtgggggtaacctgttccgtggcgctggtctggcgaaagcgggtatgaaccgcgttgtgggcgaccacatggggatgctggcgaccgtaatgaacggcctggcaatgcgtgatgcactgcaccgcgcctatgtgaacgctcgtctgatgtccgctattccattgaatggcgtgtgcgacagctacagctgggcagaagctatcagcctgttgcgcaacaaccgtgtggtgatcctctccgccggtacaggtaacccgttctttaccaccgactcagcagcttgcctgcgtggtatcgaaattgaagccgatgtggtgctgaaagcaaccaaagttgacggcgtgtttaccgctgatccggcgaaagatccaaccgcaaccatgtacgagcaactgacttacagcgaagtgctggaaaaagagctgaaagtcatggacctggcggccttcacgctggctcgtgaccataaattaccgattcgtgttttcaatatgaacaaaccgggtgcgctgcgccgtgtggtaatgggtgaaaaagaagggactttaatcacggaataattcccgtgatggataaataagggtaagattccgcgtaagtatcgcgggggcgtaagtctggttataaggcgttattgttgcaggcagtttggtcacggccagcgcgcagcaaccggagcgtacaaaagtacgtgaggatggcgagcactgcccggggccaaaatggcaaataaaatagcctaataatccagacgattacccgtaatatgtttaatcagggctatacttagcacacttccactgtgtgtgactgtctggtctgactgagacaagttttcaaggattcgtaacgtgattagcgatatcagaaaagatgctgaagtacgcatggacaaatgcgtagaagcgttcaaaacccaaatcagcaaaatacgcacgggtcgtgcttctcccagcctgctggatggcattgtcgtggaatattacggcacgccgacgccgctgcgtcagctggcaagcgtaacggtagaagattcccgtacactgaaaatcaacgtgtttgatcgttcaatgtctccggccgttgaaaaagcgattatggcgtccgatcttggcctgaacccgaactctgcgggtagcgacatccgtgttccgctgccgccgctgacggaagaacgtcgtaaagatctgaccaaaatcgttcgtggtgaagcagaacaagcgcgtgttgcagtacgtaacgtgcgtcgtgacgcgaacgacaaagtgaaagcactgttgaaagataaagagatcagcgaagacgacgatcgccgttctcaggacgatgtacagaaactgactgatgctgcaatcaagaaaattgaagcggcgctggcagacaaagaagcagaactgatgcagttctgatttcttgaacgacaaaaacgccgctcagtagatccttgcggatcggctggcggcgttttgctttttattctgtctcaactctggatgtttcatgaagcaactcaccattctgggctcgaccggctcgattggttgcagcacgctggacgtggtgcgccataatcccgaacacttccgcgtagttgcgctggtggcaggcaaaaatgtcactcgcatggtagaacagtgcctggaattctctccccgctatgccgtaatggacgatgaagcgagtgcgaaacttcttaaaacgatgctacagcaacagggtagccgcaccgaagtcttaagtgggcaacaagccgcttgcgatatggcagcgcttgaggatgttgatcaggtgatggcagccattgttggcgctgctgggctgttacctacgcttgctgcgatccgcgcgggtaaaaccattttgctggccaataaagaatcactggttacctgcggacgtctgtttatggacgccgtaaagcagagcaaagcgcaattgttaccggtcgatagcgaacataacgccatttttcagagtttaccgcaacctatccagcataatctgggatacgctgaccttgagcaaaatggcgtggtgtccattttacttaccgggtctggtggccctttccgtgagacgccattgcgcgatttggcaacaatgacgccggatcaagcctgccgtcatccgaactggtcgatggggcgtaaaatttctgtcgattcggctaccatgatgaacaaaggtctggaatacattgaagcgcgttggctgtttaacgccagcgccagccagatggaagtgctgattcacccgcagtcagtgattcactcaatggtgcgctatcaggacggcagtgttctggcgcagctgggggaaccggatatgcgtacgccaattgcccacaccatggcatggccgaatcgcgtgaactctggcgtgaagccgctcgatttttgcaaactaagtgcgttgacatttgccgcaccggattatgatcgttatccatgcctgaaactggcgatggaggcgttcgaacaaggccaggcagcgacgacagcattgaatgccgcaaacgaaatcaccgttgctgcttttcttgcgcaacaaatccgctttacggatatcgctgcgttgaatttatccgtactggaaaaaatggatatgcgcgaaccacaatgtgtggacgatgtgttatctgttgatgcgaacgcgcgtgaagtcgccagaaaagaggtgatgcgtctcgcaagctgaggataatccggctacagagagtcgcgctatttgttagcgtagggcttcagtgatatagtctgcgccatctgatcgtaagtagttggctttataaggtcaggtatgccgtggttttacacggcttttttttgtataggcttcagtattcctgagtaccgtaaaccctgtcagggaataaaaaacgcgtgatgttgtctgctactcaaccacttagcgaaaaattgccagcgcatggctgccgtcatgttgcgatcattatggacggcaatggtcgctgggcaaaaaagcaagggaagattcgtgcctttgggcataaagccggggcaaaatccgtccgccgggctgtctcttttgcggccaacaacggtattgaggcgttaacgctgtatgcctttagtagtgaaaactggaaccgaccagcgcaggaagtcagtgcgttaatggaactgtttgtgtgggcgctcgatagcgaagtaaaaagtctgcaccgacataacgtgcgtctgcgtattattggcgataccagtcgctttaactcgcgtttgcaagaacgtattcgtaaatctgaagcgctaacagccgggaataccggtctgacgctgaatattgcggcgaactacggtggacgttgggatatagtccagggagtcaggcaactggctgaaaaggtgcagcaaggaaacctgcaaccagatcagatagatgaagagatgctaaaccagcatgtctgtatgcatgaactggcccctgtagatttagtaattaggactgggggggagcatcgcattagtaactttttgctttggcaaattgcctatgccgaactttactttacagatgttctctggcccgatttcgatgaacaagactttgaaggggcgttaaatgcctttgctaatcgagagcgtcgtttcggcggcaccgagcccggtgatgaaacagcctgatgggggtcgcttttgctgaagtatcgcctgatatctgcttttgtgttaatacccgtcgtcatcgcggcgttgtttctgttgccgccggtggggttcgccattgtaacgctggtggtctgcatgctggcagcgtgggaatggggacagcttagcggttttaccactcgttcgcagcgagtatggttggcggtgttatgcgggttattgttggcgctgatgctttttctgttgccggaatatcaccgaaatattcatcaaccgctggttgaaatctcactttgggcttcgctgggttggtggattgtcgcgctattgctggtgctgttttacccaggttccgcagcaatctggcgtaactctaaaacattgcgccttatttttggcgtgctaaccattgttcccttcttctggggcatgctggcgttacgggcctggcactatgacgagaatcattacagtggcgcaatatggctgctctatgtcatgatcctggtatggggcgctgactccggcgcatatatgtttggcaaattgtttggtaaacataagctggcaccgaaggtttctccgggtaaaacctggcaaggctttatcggtggactcgctactgcagcggtaatctcatggggttatggcatgtgggcgaatctcgacgtcgctcccgtcaccttactcatttgctctattgtcgcagcgttagcctcagtgctcggcgatctgaccgagagtatgtttaagcgtgaagcaggaattaaggacagcggtcatttaattccaggacacggtggtattttagatcgtattgatagcctgacggctgcggtacctgtctttgcttgcttgttgttactggtattcaggacgctttaacggaaggtaatatgctgagttttctctgggatttggcttcgttcatcgttgcactgggtgtacttatcaccgtgcatgaatttggtcatttctgggttgcccggcgttgtggtgttcgcgttgagcgtttctcaatagggtttggtaaggcgctctggcggcgaactgataagctcggcaccgaatatgttatcgccctgatcccgttgggcggttatgtcaaaatgctggatgagcgcgcagaaccggtcgttccggaactccgccaccatgccttcaataataaatctgtcggccaacgagcggcgattattgccgcaggtccggttgcaaacttcatttttgctatctttgcctactggctggtttttattattggtgtgcctggcgtacgtccggtggttggcgaaatagcagccaattcgatagctgcggaagcacaaattgcaccaggtacggaactaaaagccgtagatggtatcgaaacgcctgattgggatgccgtgcgtttgcagttggtcgataaaattggcgatgaaagcaccaccattacagtagcgccatttggcagcgaccaacggcgggatgtaaagctcgatttacgtcactgggcgtttgagcctgataaagaagatccggtatcttcgctggggattcgtcctcgtgggccgcaaattgaacctgtactggaaaatgtgcagccaaactcggcggcaagcaaggcaggtttgcaagcaggcgacaggatcgttaaagtcgatggtcagcccttaacgcagtgggtgacctttgtgatgcttgtccgggataacccgggtaaatccttagcgttagaaatcgaaaggcaggggagtcccttgtctttgacattaatcccggagagtaaaccgggtaatggtaaagcgattggttttgtcggtattgagccgaaagtcattcctttgccagatgagtataaagttgtacgccagtatgggccgttcaacgccatcgtcgaagccacggacaaaacgtggcagctgatgaagctgacggtcagtatgctgggaaaattgatcaccggtgatgtgaaactgaacaacctcagtgggccgatctctatcgccaagggggctgggatgacagcggaactcggggttgtttattacctgccgtttcttgcgcttattagcgtgaacttagggataattaacctgtttccgttgcccgtacttgacggggggcatctgctgttccttgcgatcgaaaagatcaagggcggaccggtatccgagcgggttcaagacttttgttatcgcattggctcgattctgctggtgctgttaatggggcttgcacttttcaatgatttctctcggttatgagagttagttaggaagaacgcataataacgatggcgatgaaaaagttgctcatagcgtcgctgctgtttagcagcgccaccgtatacggtgctgaagggttcgtagtgaaagatattcatttcgaaggccttcagcgtgtcgccgttggtgcggccctcctcagtatgccggtgcgcacaggcgacacggttaatgatgaagatatcagtaataccattcgcgctctgtttgctaccggcaactttgaggatgttcgcgtccttcgtgatggtgatacccttctggttcaggtaaaagaacgtccgaccattgccagcattactttctccggtaacaaatcggtgaaagatgacatgctgaagcaaaacctcgaggcttctggtgtgcgtgtgggcgaatccctcgatcgcaccaccattgccgatatcgagaaaggtctggaagacttctactacagcgtcggtaaatatagcgccagcgtaaaagctgtcgtgaccccgctgccgcgcaaccgtgttgacctaaaactggtgttccaggaaggtgtgtcagctgaaatccagcaaattaacattgttggtaaccatgctttcaccaccgacgaactgatctctcatttccaactgcgtgacgaagtgccgtggtggaacgtggtaggcgatcgtaaataccagaaacagaaactggcgggcgaccttgaaaccctgcgcagctactatctggatcgcggttatgcccgtttcaacatcgactctacccaggtcagtctgacgccagataaaaaaggtatttacgtcacggtgaacatcaccgaaggcgatcagtacaagctttctggcgttgaagtgagcggcaaccttgccgggcactccgctgaaattgagcagctgactaagatcgagccgggtgagctgtataacggcaccaaagtgaccaagatggaagatgacatcaaaaagcttctcggtcgctatggttatgcctatccgcgcgtacagtcgatgcccgaaattaacgatgccgacaaaaccgttaaattacgtgtgaacgttgatgcgggtaaccgtttctacgtgcgtaagatccgttttgaaggtaacgatacctcgaaagatgccgtcctgcgtcgcgaaatgcgtcagatggaaggtgcatggctggggagcgatctggtcgatcagggtaaggagcgtctgaatcgtctgggcttctttgaaactgtcgataccgatacccaacgtgttccgggtagcccggaccaggttgatgtcgtctacaaggtaaaagagcgcaacaccggtagcttcaactttggtattggttacggtactgaaagtggcgtgagcttccaggctggtgtgcagcaggataactggttaggtacaggttatgctgttggtatcaacgggaccaaaaacgattaccagacctatgctgaactgtcggtaaccaacccgtacttcaccgtagatggcgtaagcctcggtggtcgtctcttctataatgacttccaggcagatgacgccgacctgtccgactataccaacaagagttatggtacagacgtgacgttgggcttcccgattaacgaatataactcgctgcgtgcaggtctgggttatgtacataactccctgtccaacatgcagcctcaggttgcgatgtggcgttatctgtactctatgggtgaacatccgagcacctctgatcaggataacagcttcaaaacggacgacttcacgttcaactatggttggacctataacaagcttgaccgtggttacttcccgacagatggttcacgtgtcaacctgaccggtaaagtgaccattcctggatcggataacgaatactacaaagtgacgttagacacggcgacttatgtgccgatcgatgacgatcacaaatgggttgttctggggcgtacccgctggggttatggtgatggtttaggcggcaaagagatgccgttctacgagaacttctatgccggtggttccagcaccgtgcgtggcttccagtccaataccattggtccgaaagcagtttacttcccgcatcaggccagtaattatgatccggactatgattacgaatgtgcgactcaggacggcgcgaaagacctgtgtaaatcggatgatgctgtaggcggtaacgccatggcggttgccagcctcgagttcatcaccccgacgccgtttattagcgataagtatgctaactcggttcgtacttccttcttctgggatatgggtaccgtttgggatacaaactgggattccagccaatattctggatatccggactatagtgatccaagcaatatccgtatgtctgcgggtatcgcattacaatggatgtccccattggggccgttggtgttctcctacgcccagccgttcaaaaagtacgatggagacaaggcagaacagttccagtttaacatcggtaaaacctggtaagtgttctccacaaaggaatgtagtggtagtgtagcgatgactttaggcgatcaatataagatcgccgggccacgcaaagaactgcaccctccggtgcaaatgggatggtaaggagtttattgtgaaaaagtggttattagctgcaggtctcggtttagcactggcaacttctgctcaggcggctgacaaaattgcaatcgtcaacatgggcagcctgttccagcaggtagcgcagaaaaccggtgtttctaacacgctggaaaatgagttcaaaggccgtgccagcgaactgcagcgtatggaaaccgatctgcaggctaaaatgaaaaagctgcagtccatgaaagcgggcagcgatcgcactaagctggaaaaagacgtgatggctcagcgccagacttttgctcagaaagcgcaggcttttgagcaggatcgcgcacgtcgttccaacgaagaacgcggcaaactggttactcgtatccagactgctgtgaaatccgttgccaacagccaggatatcgatctggttgttgatgcaaacgccgttgcttacaacagcagcgatgtaaaagacatcactgccgacgtactgaaacaggttaaataagtaatgccttcaattcgactggctgatttagcgcagcagttggatgcagaactacacggtgatggcgatatcgtcatcaccggcgttgcgtccatgcaatctgcacaaacaggtcacattacgttcatggttaacccaaaataccgtgagcatttaggcttgtgccaggcgtccgcggttgtcatgacccaggacgatcttcctttcgcgaaaagtgccgcactggtagtgaagaatccctacctgacttacgcgcgcatggcgcaaattttagataccacgccgcagcccgcgcagaacattgcacccagtgcggtgatcgacgcgacggcgaagctgggtaacaacgtatcgattggcgctaacgcggtgattgagtccggcgttgaactgggcgataacgtgattatcggtgccggttgcttcgtaggtaaaaacagcaaaatcggtgcaggttcgcgtctctgggcgaacgtaaccatttaccatgagatccagatcggtcagaattgcctgatccagtccggaacagtggtaggcgcagacggctttggttatgccaacgatcgtggtaactgggtgaagatcccacagattggtcgcgtaattattggcgatcgcgtggagatcggtgcctgcacaaccatcgatcgcggcgcgctggatgacactattattggcaatggcgtgatcattgataaccagtgccagattgcacataacgtcgtgattggcgacaatacggcggttgccggtggcgtcattatggcgggcagcctgaaaattggtcgttactgcatgatcggcggagccagcgtaatcaacgggcatatggaaatatgcgacaaagtgacggttacgggcatgggtatggtgatgcgtcccatcactgaaccaggcgtctattcctcaggcattccgctgcaacccaacaaagtctggcgcaaaaccgctgcactggtgatgaacattgatgacatgagcaagcgtctgaaatcgcttgagcgcaaggttaatcaacaagactaacgttccatcttttgttcgccaaactttacggcctgtctcattcttacgattgcggcaggccgtgttattattgtcgtttcttatattttgacaggaagagtatcttgactactaacactcatactctgcagattgaagagattttagaacttctgccgcaccgtttcccgttcttactggtggatcgcgtgctggattttgaagaaggtcgttttctgcgcgcagtaaaaaatgtctctgtcaatgagccattcttccagggccatttccctggaaaaccgattttcccgggtgtgctgattctggaagcaatggcacaggcaacaggtattctggcgtttaaaagcgtaggaaaactggaaccgggtgagctgtactacttcgctggtattgacgaagcgcgcttcaagcgcccggtcgtgcctggcgatcaaatgatcatggaagtcactttcgaaaaaacgcgccgcggcctgacccgttttaaaggggttgctctggtcgatggtaaagtagtttgcgaagcaacgatgatgtgtgctcgtagccgggaggcctgatacgtgattgataaatccgcctttgtgcatccaaccgccattgtggaagagggcgcgtcaattggcgcgaacgcacacattggtcctttttgtatcgttggaccccatgtcgaaattggtgagggtaccgtactgaaatctcacgttgtcgtgaatggtcatactaaaattggccgcgataatgagatttatcagttcgcctccatcggcgaagttaaccaggatctgaaatatgctggcgaaccgacccgtgtggaaatcggcgatcgtaaccgcattcgcgaaagcgtcaccattcatcgtggcacagtccagggcggtggattgacgaaggtgggcagcgacaacttactgatgatcaacgcgcacattgcgcacgattgtacggtaggtaaccgctgtattctcgccaacaacgcaacgctggcgggtcacgtatcggttgacgacttcgcgatcatcggcggcatgaccgcagtccatcagttctgcatcattggtgcgcacgtgatggttggcggctgctccggtgtggcgcaggacgtccctccttatgtcattgcgcagggtaaccacgcaacgccgttcggtgtcaatatcgaagggctgaagcgccgcggattcagccgtgaggcgattaccgctatccgcaatgcgtataagctgatttatcgtagcggtaaaacgctcgatgaagtgaaaccggaaattgctgaactggcggaaacatatccggaagtgaaagcctttaccgatttctttgcacgctcaacgcgcggtctgattcgttaatgactgaacagcgtccattaacgattgccctggtcgccggagaaacctccggcgatatcctgggggccggtttaatccgcgctctgaaagaacatgtgcccaacgcccgctttgttggtgttgccgggccacgaatgcaggctgaaggctgcgaagcctggtacgaaatggaagaactggcggtgatgggcattgttgaagtgctcggtcgtctgcgtcgcttactgcatattcgtgccgatctgacaaagcgttttggcgaactgaagccagatgtttttgttggtattgatgcgcctgacttcaatattactcttgaaggtaacctcaaaaagcagggtatcaaaaccattcattacgtcagtccgtcagtctgggcgtggcgacagaaacgtgttttcaaaataggcagagccaccgatctggtgctcgcatttctgcctttcgaaaaagcgttttatgacaaatacaacgtaccgtgccgctttatcggtcataccatggctgatgccatgccattagatccagataaaaatgccgcccgtgatgtgctggggatccctcacgatgcccactgcctggcgttgctaccggggagccgtggtgcagaagttgaaatgcttagtgccgatttcctgaaaacggcccagcttttgcgccagacatatccggatctcgaaatcgtggtgccactggtgaatgccaaacgccgcgagcagtttgaacgcatcaaagctgaagtcgcgccagacctttcagttcatttgctggatgggatgggccgtgaggcgatggtcgccagcgatgcggcgctactggcgtcgggtacggcagccctggagtgtatgctggcgaaatgcccgatggtggtgggatatcgcatgaagccttttaccttctggttggcgaagcggctggtgaaaactgattatgtctcgctgccaaatctgctggcgggcagagagttagtcaaagaattattgcaggaagagtgtgagccgcaaaaactggctgcggcgctgttaccgctgttggcgaacgggaaaaccagccacgcgatgcacgataccttccgtgaactgcatcagcagatccgctgcaatgccgatgagcaggcggcacaagccgttctggagttagcacaatgatcgaatttgtttatccgcacacgcagctggttgcgggtgtggatgaagtcggacgcgggccgttagttggcgcggtcgtcaccgctgcggtgatccttgacccggcgcgcccgattgccgggctgaatgattccaaaaagctgagcgaaaaacgccgtctggcgctctatgaagagatcaaagagaaagcgttgagctggagtctgggccgcgcggaaccccacgaaatcgacgagctgaacattcttcatgcgaccatgctggcgatgcagcgtgccgtcgctgggctgcatattgcgccggaatatgtgttgattgatggtaaccgctgcccgaaattaccgatgcctgcgatggctgtggtgaaaggcgatagccgcgtaccggaaatcagtgccgcgtctatcctggcgaaagtgacgcgtgacgccgaaatggcggcgctggatattgttttcccgcaatatggttttgcccaacacaaagggtacccaaccgcttttcatctggaaaaactggctgaacacggcgcgaccgaacaccatcggcgcagctttgggcctgtcaaacgcgcactgggacttgcgtcctgattcttgtgtcgagattaagtaaaccggaatctgaagatgtctgaaccacgtttcgtacacctgcgggtgcacagcgactactcgatgatcgatggcctggccaaaaccgcaccgttggtaaaaaaggcggcggcgttgggtatgccagcactggcgatcaccgatttcaccaacctttgtggtctggtgaagttctacggagcgggacatggcgcagggattaagcctatcgtcggggcagattttaacgtccagtgcgacctgctgggtgatgagttaacccacctgacggtactggcggcgaacaataccggctatcagaatctgacgttgctgatctcaaaagcgtatcagcgcgggtacggtgccgccgggccgatcatcgatcgcgactggcttatcgaattaaacgaagggttgatccttctttccggcggacgcatgggcgacgtcggacgcagtcttttgcgtggtaacagcgcgctggtagatgagtgtgtcgcgttttatgaagaacacttcccggatcgctattttctcgagctgatccgcaccggcaggccggatgaagaaagctatctgcacgcggcggtggaactggcggaagcgcgcggtttgcccgtcgtggcgaccaacgacgtgcgctttatcgacagcagcgactttgacgcacacgaaatccgcgtcgcgatccacgacggctttaccctcgacgatcctaaacgcccgcgtaactattcgccgcagcaatatatgcgtagcgaagaggagatgtgtgagctgtttgccgacatccccgaagcccttgccaacaccgttgagatcgccaaacgctgtaacgtaaccgtgcgtcttggtgaatacttcctgccgcagttcccgaccggggacatgagcaccgaagattatctggtcaagcgtgcaaaagagggcctggaagagcgtctggcctttttattccctgatgaggaagaacgtcttaagcgccgcccggaatatgacgaacgtctggagactgaacttcaggttatcaaccagatgggcttcccgggctacttcctcatcgttatggaatttatccagtggtcgaaagataacggcgtaccggtagggccaggccgtggctccggtgcgggttcactggtggcctacgcgctgaaaatcaccgacctcgatccgctggaatttgacctgctgttcgaacgtttccttaacccggaacgtgtctccatgcctgacttcgacgttgacttctgtatggagaaacgcgatcaggttatcgagcacgtagcggacatgtacggtcgtgatgcggtatcgcagatcatcaccttcggtacaatggcggcgaaagcggtgatccgcgacgtaggccgcgtgctggggcatccgtacggctttgtcgatcgtatctcgaaactgatcccgcccgatccggggatgacgctggcgaaagcgtttgaagccgagccgcagctgccggaaatctacgaagcggatgaagaagttaaggcgctgatcgacatggcgcgcaaactggaaggggtcacccgtaacgccggtaagcacgccggtggggtggttatcgcgccgaccaaaattaccgattttgcgccgctttactgcgatgaagagggcaaacatccggtcacccagtttgataaaagcgacgttgaatacgccggactggtgaagttcgacttccttggtttgcgtacgctcaccatcatcaactgggcgctggagatgatcaacaagcggcgggcgaagaatggcgagccgccgctggatatcgctgcgatcccgctggatgataagaaaagcttcgacatgctgcaacgctcggaaaccacggcggtattccagcttgaatcgcgcggcatgaaggacctgatcaagcgtctacaacctgactgcttcgaagatatgatcgccctagtggcactgttccgccccggtccgttgcaatcagggatggtggataactttatcgaccgtaaacatggtcgtgaagagatctcctatccggacgtacagtggcagcatgaaagcctgaaaccggtactggagccaacctacggcattatcctgtatcaggaacaggtcatgcagattgcgcaggtgctttctggttataccctcggtggcgcggatatgctgcgtcgtgcgatgggtaagaaaaagccggaagagatggctaagcaacgttctgtatttgctgaaggtgcagaaaagaacggaatcaacgctgaactggcgatgaaaatcttcgacctggtggagaaattcgctggttacggatttaacaaatcgcactctgcggcctatgctttggtgtcatatcaaacgttatggctgaaagcgcactatcctgcggagtttatggcggcggtaatgaccgccgatatggacaacaccgagaaggtggtgggtctggtggatgagtgctggcggatggggctgaaaatcctgccaccagatataaactccggtctttaccatttccacgtcaacgacgacggcgaaatcgtgtatggtattggcgcgatcaaaggggtcggtgaaggtccgattgaggccatcatcgaagcccgtaataaaggcggctacttccgcgaactgtttgatctctgcgcccgtaccgacaccaaaaagttgaaccgtcgcgtgctggaaaaactgatcatgtccggggcgtttgaccgtcttgggccacatcgcgcagcgctgatgaactcgctgggcgatgcgttaaaagcggcagatcaacacgcgaaagcggaagctatcggtcaggccgatatgttcggcgtgctggccgaagagccggaacaaattgaacaatcctacgccagctgccaaccgtggccggagcaggtggtattagatggggaacgtgaaacgttaggcctgtacctgaccggacaccctatcaaccagtatttaaaagagattgagcgttatgtcggaggcgtaaggctgaaagacatgcacccgacagaacgtggtaaagtcatcacggctgcggggctcgttgttgccgcgcgggttatggtcaccaagcgcggcaatcgtatcggtatctgcacgctggatgaccgttccgggcggctggaagtgatgttgtttactgacgccctggataaataccagcaattgctggaaaaagaccgcatacttatcgtcagcggacaggtcagctttgatgacttcagcggtgggcttaaaatgaccgctcgcgaagtgatggatattgacgaagcccgggaaaaatatgctcgcgggcttgctatctcgctgacggacaggcaaattgatgaccagcttttaaaccgactccgtcagtctctggaaccccaccgctctgggacaattccagtacatctctactatcagagggcggatgcacgcgcgcggttgcgttttggcgcgacgtggcgtgtctctccgagcgatcgtttattaaacgatctccgtggcctcattggttcggagcaggtggaactggagtttgactaatacaggaatactatgagtctgaatttccttgattttgaacagccgattgcagagctggaagcgaaaatcgattctctgactgcggttagccgtcaggatgagaaactggatattaacatcgatgaagaagtgcatcgtctgcgtgaaaaaagcgtagaactgacacgtaaaatcttcgccgatctcggtgcatggcagattgcgcaactggcacgccatccacagcgtccttataccctggattacgttcgcctggcatttgatgaatttgacgaactggctggcgaccgcgcgtatgcagacgataaagctatcgtcggtggtatcgcccgtctcgatggtcgtccggtgatgatcattggtcatcaaaaaggtcgtgaaaccaaagaaaaaattcgccgtaactttggtatgccagcgccagaaggttaccgcaaagcactgcgtctgatgcaaatggctgaacgctttaagatgcctatcatcacctttatcgacaccccgggggcttatcctggcgtgggcgcagaagagcgtggtcagtctgaagccattgcacgcaacctgcgtgaaatgtctcgcctcggcgtaccggtagtttgtacggttatcggtgaaggtgggtctggcggtgcgctggcgattggcgtgggcgataaagtgaatatgctgcaatacagcacctattccgttatctcgccggaaggttgtgcgtccattctgtggaagagcgccgacaaagcgccgctggcggctgaagcgatgggtatcattgctccgcgtctgaaagaactgaaactgatcgactccatcatcccggaaccactgggtggtgctcaccgtaacccggaagcgatggcggcatcgttgaaagcgcaactgctggcggatctggccgatctcgacgtgttaagcactgaagatttaaaaaatcgtcgttatcagcgcctgatgagctacggttacgcgtaattcgcaaaagttctgaaaaagggtcacttcggtggcccttttttatcgccacggtttgagcaggctatgattaaggaaggattttccaggaggaacacatgaacatcattgccattatgggaccgcatggcgtcttttataaagatgagcccatcaaagaactggagtcggcgctggtggcgcaaggctttcagattatctggccacaaaacagcgttgatttgctgaaatttatcgaacataaccctcgaatttgcggcgtgatttttgactgggatgagtacagtctcgatttatgtagcgatatcaatcagcttaatgaatatctcccgctttatgccttcatcaacacccactcgacgatggatgtcagcgtgcaggatatgcggatggcgctctggttttttgaatatgcgctggggcaggcggaagatatcgccattcgtatgcgtcagtacaccgacgaatatcttgataacattacaccgccgttcacgaaagccttgtttacctacgtcaaagagcggaagtacaccttttgtacgccggggcatatgggcggcaccgcatatcaaaaaagcccggttggctgtctgttttatgattttttcggcgggaatactcttaaggctgatgtctctatttcggtcaccgagcttggttcgttgctcgaccacaccgggccacacctggaagcggaagagtacatcgcgcggacttttggcgcggaacagagttatatcgttaccaacggaacatcgacgtcgaacaaaattgtgggtatgtacgccgcgccatccggcagtacgctgttgatcgaccgcaattgtcataaatcgctggcgcatctgttgatgatgaacgatgtagtgccagtctggctgaaaccgacgcgtaatgcgttggggattcttggtgggatcccgcgccgtgaatttactcgcgacagcatcgaagagaaagtcgctgctaccacgcaagcacaatggccggttcatgcggtgatcaccaactccacctatgatggcttgctctacaacaccgactggatcaaacagacgctggatgtcccgtcgattcacttcgattctgcctgggtgccgtacacccattttcatccgatctaccagggtaaaagtggtatgagcggcgagcgtgttgcgggaaaagtgatcttcgaaacgcaatcgacccacaaaatgctggcggcgttatcgcaggcttcgctgatccacattaaaggcgagtatgacgaagaggcctttaacgaagcctttatgatgcataccaccacctcgcccagttatcccattgttgcttcggttgagacggcggcggcgatgctgcgtggtaatccgggcaaacggctgattaaccgttcagtagaacgagctctgcattttcgcaaagaggtccagcggctgcgggaagagtctgacggttggtttttcgatatctggcaaccgccgcaggtggatgaagccgaatgctggcccgttgcgcctggcgaacagtggcacggctttaacgatgcggatgccgatcatatgtttctcgatccggttaaagtcactattttgacaccggggatggacgagcagggcaatatgagcgaggaggggatcccggcggcgctggtagcaaaattcctcgacgaacgtgggatcgtagtagagaaaaccggcccttataacctgctgtttctctttagtattggcatcgataaaaccaaagcaatgggattattgcgtgggttgacggaattcaaacgctcttacgatctcaacctgcggatcaaaaatatgctacccgatctctatgcagaagatcccgatttctaccgcaatatgcgtattcaggatctggcacaagggatccataagctgattcgtaaacacgatcttcccggtttgatgttgcgggcattcgatactttgccggagatgatcatgacgccacatcaggcatggcaacgacaaattaaaggcgaagtagaaaccattgcgctggaacaactggtcggtagagtatcggcaaatatgatcctgccttatccaccgggcgtaccgctgttgatgcctggagaaatgctgaccaaagagagccgcacagtactcgattttctactgatgctttgttccgtcgggcaacattaccccggttttgaaacggatattcacggcgcgaaacaggacgaagacggcgtttaccgcgtacgagtcctaaaaatggcgggataacttgccagagcggcttccgggcgagtaacgtgctgttaacaaataaaggagacgttatgctgggtttaaaacaggttcaccatattgcgattattgcgacggattatgcggtgagcaaagctttctactgcgatattcttggtttcacgctgcaaagcgaagtctatcgcgaagcgcgcgactcatggaaaggggatttggcgcttaatgggcaatatgtgattgagcttttctcatttccgttcccgccggaacgacccagccgaccggaagcttgcggtctgcgtcatctggcttttagcgttgatgacatcgatgcggcagtggcgcaccttgaaagccataacgtgaagtgtgaaaccatccgtgtcgatccatacacgcaaaaacgcttcaccttctttaacgatccggacgggctgccgttggaactgtatgagcagtaaggcttgtcatcgccgcatttgcccggtaacgtgccgggcattgctactgtaaaatcgcaccatcatgacactcacgctcaatagacaacttctcacctcacgccagattctggtggcctttagcggcgggcttgactccaccgttctgctgcatcagttggtgcagtggcggacggaaaatccgggtgtcgctctgcgcgctattcatgtgcatcacggtttaagtgccaatgccgatgcctgggttacgcattgcgaaaacgtctgccaacagtggcaggtgccgctggtggtcgaacgcgtacaacttgcgcaagaaggactgggcattgaggcccaggcgcggcaggcacgttatcaggcatttgcccgcaccttgttgcccggtgaagtgctggtcaccgcgcaacatctcgacgatcaatgtgaaacctttctgctggcgctaaaacgcggcagtggccctgccgggctttcggctatggcggaagtctcggagtttgccggaacgcggcttattcgcccgttgctcgcccgcacgcggggggaactggtgcagtgggcgcgtcagtatgatttacgctggattgaagacgaaagtaatcaggacgactcatacgatcgtaactttctgcgcctgcgcgtagtgccgttattgcagcagcgttggccgcattttgccgaagcaacggcccgcagcgccgcactttgtgctgaacaagagagcctgctggatgaactgctggcagatgatttagcacactgtcaatcgccgcaggggacgctgcagattgtgccaatgctggcgatgagtgatgcccgccgcgcggcgattatccgccgctggctggcagggcagaatgcaccgatgccttcccgcgacgcgttggtgaggatctggcaggaagtggcgctggcgcgggaagatgcctcaccctgtttacgtttgggcgcgtttgaaatccgacgctatcagtcgcaactgtggtggattaaatccgtcaccgggcaaagcgaaaacattgtgccgtggcagacgtggcttcaaccgctggaattaccggcggggctgggaagtgtacagcttaatgcgggaggcgatattcgccctccgcgtgcagacgaagcggtcagcgtgcgtttcaaagcgccaggattgctgcatattgtcgggcgtaacggcggacgtaagctaaagaaaatctggcaagagctgggcgtgccgccgtggctacgtgacaccacgccactgctgttttatggcgaaacgctgattgcggcggcaggggtatttgtgacgcaagaaggtgtggctgaaggtgagaatggcgtaagttttgtctggcagaaaacgcttagttaagtgaaagccggataagacgcatcaaacgtcgcatccggcgaaagtcaatcaggattcgcttaccaccaccgtaccgatttccgggtggctaaagctggtaattttatccagacgcagctcgcgggtttcgccagcggcctcgacgaccaggtactccacatttttgcgggagactaaatcactggcttttgcctgcaatttttcgccatctttcagctcaagtgtcagcattaaatgatgctggcaggcgagctcaagattatcgtaatcatcacaattgattggttgatacgtatcattcattgacataatcgctcaccagtaagtttgccgcagcgtatgctgctttttccctgacagcctcagaaagggcgtcgtcggcagccatttcattcagcactttcaaaacgcagcccagcgcgtccggaacgtatcctaagtctccgctggcgatttccgcgtaccgcttgcgtattaactcacaatatttttccacatgccctcctgtcagcactctgacttaaccgtggatgcaagtctaagcctacgaagataaactctgtttcgcaaggtgactataccacactcatttctgcaatatcagcgccgcaactgcacgtattccgttacaatggcctcctgattcgaaaggagttttcttatggcgcttaaagcgacaatttataaagcgacggttaatgtggccgatctcgaccgcaaccagtttctcgatgcctctctgacgctggcgcgccatccttcagaaacccaggagcgtatgatgctgcgcttgctggcgtggctgaaatatgctgatgaacgtctgcaatttacccgtggtttgtgtgccgatgatgagccggaagcgtggctgcgtaacgatcacctgggcattgatttgtggattgagctggggctgccggatgagcggcggattaagaaagcctgcacccaggccgcagaagtggcgctgtttacctataatagtcgggcggcgcaaatctggtggcagcaaaatcagagcaaatgtgtgcagtttgccaatctttccgtctggtatctggacgatgaacaactggcgaaagtaagcgcctttgccgatcgtaccatgacgctgcaggcaacgattcaggatggcgtgatctggttatcggatgataagaataatctggaagtgaacttaaccgcctggcaacaaccttcatgattgtgatttcccgacatgttgctattcccgatggtgagcttgagatcaccgccattcgtgcgcagggcgcgggcgggcagcatgttaataagacctcaacggctattcatctgcgttttgacattcgggcgtccagcctgccagagtattacaaagagcgtctgctcgccgccagccatcatttgatcagcagtgatggcgtgattgtcattaaggcacaggaataccgcagtcaggaactgaaccgcgaagcagctctggcccggctggtggctatgattaaagaattaacaacagaaaaaaaagcccgacgacccacgcggcccacccgtgcatcgaaagagcgcaggctggcatcgaaagcacaaaaatcaagcgtgaaggcgatgcgcggcaaagtgcgcagcggtcgggaataaaaagaaggaatggatggtgaaaaaagcgatagtgacagcgatggctgtaatcagcctctttactctgatgggatgtaataatcgggccgaagtcgatacgctttctccggcgcaggctgccgaactgaaaccgatgccgcaaagttggcgcggcgtgctgccgtgtgccgattgcgaaggaatcgaaacctctctgttcctcgaaaaagacggaacatgggtgatgaatgagcgttatctcggtgctcgtgaagaaccttcctccttcgcttcctacggtacatgggcgcgaaccgctgacaagctggtattaaccgacagcaaaggtgaaaagtcatattatcgggcgaaaggcgatgcgctggagatgctcgatcgtgaaggcaatccgattgaatcgcagttcaactatacgctggaagcggcacaatccagtttacctatgacgccgatgaccctgcggggcatgtatttttatatggctgatgcggcgaccttcactgattgcgcgaccggaaaacgtttcatggtagcgaataacgcagagctggagcgtagctacctggctgcgcgcggtcacagtgaaaaaccggtgttactgtcagtagaaggtcactttacgcttgagggtaatccggataccggtgcgccgactaaagtattggcacccgatacggcagggaaattttaccccaaccaggattgcagtagtttggggcagtaacccgtcttgagacagaaacaaacgcaaaacaggccagaaggatatatttcaacattttgaatttgcacgttttttgtaggccggataaggcgtttacgccgcatccggcaatggtgctcaacgcctgatgcgacgctggcgcgtcttatcatgcctacaacccccctcataccttaaggcggataaggcatttactttatcaccgggtcaaaccaacaaagcgacccgccttgatataaatcccaggcttcaggtgcccaacatactgtaactgcgtttctggcttaaacgcagagacatcgccagtacgcatatgcatcagatcggcagggctaatccagcctgattgcgccagcgtaagcggatgcccggctttggcaaatgcatcagtgacaaattccgaacaaaaccacgactttttgtctccttcgcccacactgcttaactgcgctttcgccaggccgctgacgcactgttggcgaaaatctgcggaaaaaggattcagtgagcacatctggcgggtcaccataaagggaatgaactcgacaatgccgcgatagttatacccgctatctttgattttgttggcgaacgcggtgatttctgtggcttgttgcggagtaaggtccgggactcgtaaaacgaaaagcttatcactgtgcttcatggcttttttcagggaaacaatctggacgccagcgcctgtcgcttctgcaacgttattatcacccagatagattgcaacgtgactcacagaggaagtgctgaaaacgcggattccaaatgaggttaccccaaggcttgaggagaacagcaaatcgccgggtttgagatcaggctcggttatttcttttattgattgttcggtgaaagagctttgatgctggaatttgacagcccatgttttcgcctcggcatctaccgctgtggctgatgagtctggctggctgatatcaacggtacaggccgaaagtaaaagaaagctggggagaagcaggcggtagtacgcctttggtttatccattttatacaatccatgtaaaaaagggccctgaaattcagggccctttctggcatcagcctttaatctgtttcaccagataatcgacgatgtcaccagtcttaattagctgtttctcgccgttgcgacgatatttatattcaatatcgtcgttgtcaaggttacggtcgcccagcacaatagtgtgcggaataccgatcagttccatatcggcaaacatcacgcccggacgttcttttcggtcatccagcagcacttcgataccttgtgcacgcagttcgctgtacagtttctcagcaagctcctgtacgcggaaggatttgtgcatgttcatcggcagaatcgccacctggaacggtgcgatcgcgtcaggccatacgatgccgcgttcgtcgtagttctgctcaatcgccgcagctactacacgcgttaccccgataccgtagcaacccatcgtcaggatttggttacggccatcttcaccctgtacggaggctttcagtgcttcggagtacttggtacccagctggaagatgtgaccaacttcgataccacgtttgatcagcagcgtaccctgaccatccgggcttggatcgcccgccaccacgttgcggatatcagcaatttccggggtagcgacatcgcgatcccagttgataccgaagtagtgtttaccatcgatgttagcaccagcagcgaaatcactcatcgccgcaacggtacggtcaatcaccaccggaatcggcatgtttaccggacccagtgaacccggaccggctttaaccacggcacgaatttcttcttcagtcgcgaaagtcagcgggcttgcaacctgcggcagtttttctgctttaacttcgttcagctcgtgatcaccgcgcaccagcagcgcaaccagcgggaagctgctgccttcaaccgctttaaccagcagagtcttaaccgttttctcaatcggcagattgaactgttcaaccagttccgcgatggttttcgcgttcggcgtatcaaccagcgtcatttcctgggtagcagcagcgcgcggttctttcggcgcgatagcttctgccagttcaatgttcgctgcatagtcagaggtgtcggagaagaccacatcgtcttcaccgctctgcgccagcacctggaattcgtgagaggcgctgccgcctatagaaccggtgtcggcttgtacggcgcggaaatccagccccatgcggctgaagattttgctgtaggccgcatacattgcatcgtaggtttcctgcagggattcctgagaagtatggaaagagtaagcatctttcatcaggaattcgcgggaacgcatgacgccgaaacgcggacgcacttcgtcgcggaacttggtctggatctgatagaagttcagcggcagctgtttgtaagagctaagctcgttacgaatcaggtcagtgataacttcttcatgagttgggccgagtacgaacggacgctcgccacggtcaacaaaacgcagcagttccggaccgtactgttcccaacgaccactctcttgccacaaatcggctggctgaaccaccggcatcgacacctcgattgcaccggcgttgttcatctcttcacgcacgatgttttcgacttttttcagaacgcgcacgccggtcggcagccaggtatataacccggaggccagcttgcggatcatcccggcgcgcagcatcagctgatggctgatcacctcggcgtcggcaggtgtctccttgagagtggagagcaggtattggctagtacgcatgttgttacggttccagttggaaggtagaacaggctcaaggcgagcctgggacaaaaaaagtgatttagtttaccagtgcaaaagaaatgtcaaaagagaagggcgtgaatttaacgcggttccagcgcaaagacttcaaaacctgcgtcggtgacgcgccagcgaacgttaaaatcatgtagccagacggcataggttttgcccgtttcctcacctttacgataggccgggcgcgggtcctgcgccagtacttcgcggataaacagcgttaactgcggataacgcttctccagcgtcaaaagctgcttttcgacctctgcggtaaaactcaccgccatctctgcagctggcgcactttgcgcatagctggcactggcatcgggaagcgattcggcaaaggggagatacggtttgatatccactaccggcgtaccatcgaccagatccagactgccgagcttcagaatcacgctgtctttatggcaaacaacctctttcagctctaccagcgacatgccaattgggttagggcggaaagtagagcgtgttgcgaaaacccccattctggcgttaccgccgaggcgcggtggacgcacagtcggacgccagccgccttccatcgtttgatgaaagacgaaaaggatccataaatggctgaacgcttccaggccgcgaacggcgtcggcctggttgtagggagcaatgagatgcagttcgccgttggcgctttttaccagacctggctggcgcggaacggcgaacttttctttatagggcgagcgaataacgcctatttgctcgaactggaaactgctcatttcgccgtaatgttaagcgcagaaccgatacatacagcctgacgatagcagcctggcgtaccgctggtgacttcgcagctatgcagtaatacagcattggctttcattttagaggcgttgatttgcatccgcttacgtgcggttggaatgctcggcggagagtcctgattagaggcctggcaagagtcgccactgacttcaccgagatcgcggaacggtttgccgactaattcttctgcattggtataaattcggaccggcgtggcgcgcggcgctttcggttttgcaggctccgctttcggctggggtgcagtgctttgaacgggttcgacaggggatctgcttaacatggaacagccgcttagcatgagtgctactaaacagatcggtaaagcacgcatagtatttcctcaatgtatgatcaaaacgtcaatattgaatcaggagcttgtaaaaatgacaagacgggcaagcgcccgtcctgaatgatattacaaattgtggaaacagcctaaaaattaccagcctttaacagctccgccgttaaacactttgtttgctgcttcgtaaacttcgtcagactgataagcctggacgaatttcttcacgttctcggcgtctttgttatcttcacgcgtcacgatcaggtttacgtacggggactctttatcttcaacaaagataccgtctttcgccggagtcaggccaatctggctggcataggtggtattgataactgccagagcgatttgcgcgtcgtccagagaacgcggcagttgcggtgcttccagttcaacaattttcagatttttggggttctcaacaacatcaagaacggtcggcagcaggccaacgccatctttcagtttgatcaagcccactttttgcagcagcagcagtgaacgaccaaggttagttgggtcgtttggcacggcaacctgcgaaccatcctgcagttcatccagtgatttgattttcttggagtaaccagcaatcggataaacaaaagtgttgcctactgcgaccagtttgtagccacgatctttcagttgctgatcaaggtacggtttatgctggaaggcgttggcgtcgatatcgcctttgctcaatgcttcgtttggcagaacatagtcgttgaaggttaccagctcaacgtccaggccatatttgtctttcgcaactttctgcgcgacttctgcaacctgctgttcggcaccaacaatcacgccgactttaatgtggtttggatctttttcatcctgaccgcagcctaccagtgccagtgatccgatcagggctcccactgccgcaaaggttttgaatttgaacgccataccttattccttcttcaattatttatgttgtgttgaacgttacttgcgagtgacagcccggacgatgcggtcgcctgcgaactgaattaaataaaccagaatgaccagcaataccagtaccgtattcatcaccgtcgcgttatagccgatgtagccatactgatagccaatctgacctaaaccaccggcaccgactgcaccacccatcgcggaataaccgaccagggtaatcagggtgatagttgccgcattcaccagacccggcagcgcttccggtaacagcaccttacggacgatctgcatcggcgtggcacccattgcgcgggaagcttcaattaacccggttgggatctccagcagagcgttctcgaccatacgggcaataaacggtgctgcaccaacggttaacggaacaatcgctgcctgcaaaccaatcgatgtaccgacaataacgcgggtaaacggaatcatccatacaagcaagataatgaacgggatggaacggaaaatgttcacaatcgcagaaacggtacgatacagcttcgcgttagcaataatttgccccggacgcgtgacataaagcagaacgccaatcggcagaccaatcacaaagccaaaaaaaccggatacgaaggtcattgccagcgtttcccatacgccacgaaccagcagccacatcatcggctcagacataacccagtacctctacttttacatggtgttcctgcagccaggcaatggcggcttgcgtatcttgttgtgtgccgtgcatttcagtcagcatgatgccgaacttaacgccaccggcgtaatccatctgcgcgctaataatgttgttgttgacgttgaaacgacgcgcggtttcagaaagcagtggggcatcgaccgattgaccggtaaactccagacgcagcatcggcacgcagtcagtaaatggctccgcttgcagacgttcctggtaatcttccgggatatccagatgcagggtcgactgaataaacttctgcgccagcggcgttttcggatgcgagaacacttcacttaccgtgtcctgctcgatcagttctccattgctgatgaccgccacgcaatcacaaatgcgcttcacaacgtccatttcgtgggtgatcaacagaatcgtcaaccccagacggcggttgatgtctttcagcagttcgagaatagaacgtgtcgttgccgggtccagcgcgctggtggcttcatcacacagcaatactttgggattgctggctaacgcacgggcaattgccacacgttgtttctgcccaccggaaagattcgacgggtagctatcatgcttatcgccaagaccaaccaatgacagcaattccgtcacgcgacgtttgacctcgtctttcggtgtgttgtccagctccagcggcagagccacgttgccaaaaacagtacgcgaagagagcaggttaaaatgctggaaaatcataccaatctggcggcgagctttggtcaactcggattctgacagcgtggtcagttcctggccatcgaccagcacgctaccctcggttgggcgctccagcaggtttacacaacgtataagcgtactcttacccgcgcctgaggcaccgataacgccataaatttgtccagctggcacatgcaggctgacgttgttcaacgcctggatggtgcgggtgccctggtggaacactttggtgatattcgaaagttttatcattgattatttattatcgtcattaagttagtcgtggcatctcgaatgcctgaaacgggcaacgccgtcaatgaaatggatgttaaggcatccagacgtctaaatcaatcaggtttatgcgaagagcactttcttgcaggtcgaaacatgcgatactagcgtcacatgccttattaaggagctataaaaggtggcgaagagcgtacccgcaatttttcttgaccgtgatggcaccattaatgtcgatcacggctatgtccatgagatcgacaactttgaatttatcgacggtgttattgacgccatgcgcgagctaaaaaaaatgggctttgcgctggtggtagtaaccaaccagtctggcattgctcgcggtaaatttaccgaagcacagtttgaaacgctgaccgagtggatggactggtcgctggcggaccgagatgtcgatctggatggtatctattattgcccgcatcatccgcagggtagtgttgaagagtttcgccaggtctgcgattgccgcaaaccacatccggggatgcttttgtcagcacgcgattatttgcatattgatatggccgcttcttatatggtgggcgataaattagaagatatgcaggcagcggttgcggcgaacgtgggaacaaaagtgctggtgcgtacgggtaaacctattacgcctgaagcagaaaacgcggcggattgggtgttaaatagcctggcagacctgccgcaagcgataaaaaagcagcaaaaaccggcacaatgattaaaagatgagcggttgaaataaaaatgcatttttccgcttgtcttcctgagccgactccctataatgcgcctccatcgacacggtggatgtgaatcacttcacacaaacagccggttcggttgaagagaaaaatcctgaaattcagggttgactctgaaagaggaaagcgtaatatacgccacctcgcgacagtgagctgaaagccgcgtcgcaactgctctttaacaatttatcagacaatctgtgtgggcactcgaagatacggattcttaacgtcgcaagacgaaaaatgaataccaagtctcaagagtgaacacgtaattcattacaaagtttaattctttgagcgtcaaacttttaaattgaagagtttgatcatggctcagattgaacgctggcggcaggcctaacacatgcaagtcgaacggtaacaggaaacagcttgctgtttcgctgacgagtggcggacgggtgagtaatgtctgggaaactgcctgatggagggggataactactggaaacggtagctaataccgcataacgtcgcaagaccaaagagggggaccttcgggcctcttgccatcggatgtgcccagatgggattagctagtaggtggggtaacggctcacctaggcgacgatccctagctggtctgagaggatgaccagccacactggaactgagacacggtccagactcctacgggaggcagcagtggggaatattgcacaatgggcgcaagcctgatgcagccatgccgcgtgtatgaagaaggccttcgggttgtaaagtactttcagcggggaggaagggagtaaagttaatacctttgctcattgacgttacccgcagaagaagcaccggctaactccgtgccagcagccgcggtaatacggagggtgcaagcgttaatcggaattactgggcgtaaagcgcacgcaggcggtttgttaagtcagatgtgaaatccccgggctcaacctgggaactgcatctgatactggcaagcttgagtctcgtagaggggggtagaattccaggtgtagcggtgaaatgcgtagagatctggaggaataccggtggcgaaggcggccccctggacgaagactgacgctcaggtgcgaaagcgtggggagcaaacaggattagataccctggtagtccacgccgtaaacgatgtcgacttggaggttgtgcccttgaggcgtggcttccggagctaacgcgttaagtcgaccgcctggggagtacggccgcaaggttaaaactcaaatgaattgacgggggcccgcacaagcggtggagcatgtggtttaattcgatgcaacgcgaagaaccttacctggtcttgacatccacagaactttccagagatggattggtgccttcgggaactgtgagacaggtgctgcatggctgtcgtcagctcgtgttgtgaaatgttgggttaagtcccgcaacgagcgcaacccttatcctttgttgccagcggtccggccgggaactcaaaggagactgccagtgataaactggaggaaggtggggatgacgtcaagtcatcatggcccttacgaccagggctacacacgtgctacaatggcgcatacaaagagaagcgacctcgcgagagcaagcggacctcataaagtgcgtcgtagtccggattggagtctgcaactcgactccatgaagtcggaatcgctagtaatcgtggatcagaatgccacggtgaatacgttcccgggccttgtacacaccgcccgtcacaccatgggagtgggttgcaaaagaagtaggtagcttaaccttcgggagggcgcttaccactttgtgattcatgactggggtgaagtcgtaacaaggtaaccgtaggggaacctgcggttggatcacctccttaccttaaagaagcgtactttgcagtgctcacacagattgtctgatgaaaatgagcagtaaaacctctacaggcttgtagctcaggtggttagagcgcacccctgataagggtgaggtcggtggttcaagtccactcaggcctaccaaatttgcacggcaaatttgaagaggttttaactacatgttatggggctatagctcagctgggagagcgcctgctttgcacgcaggaggtctgcggttcgatcccgcatagctccaccatctctgtagtgattaaataaaaaatacttcagagtgtacctgcaaaggttcactgcgaagttttgctctttaaaaatctggatcaagctgaaaattgaaacactgaacaacgaaagttgttcgtgagtctctcaaattttcgcaacacgatgatgaatcgaaagaaacatcttcgggttgtgaggttaagcgactaagcgtacacggtggatgccctggcagtcagaggcgatgaaggacgtgctaatctgcgataagcgtcggtaaggtgatatgaaccgttataaccggcgatttccgaatggggaaacccagtgtgtttcgacacactatcattaactgaatccataggttaatgaggcgaaccgggggaactgaaacatctaagtaccccgaggaaaagaaatcaaccgagattcccccagtagcggcgagcgaacggggagcagcccagagcctgaatcagtgtgtgtgttagtggaagcgtctggaaaggcgcgcgatacagggtgacagccccgtacacaaaaatgcacatgctgtgagctcgatgagtagggcgggacacgtggtatcctgtctgaatatggggggaccatcctccaaggctaaatactcctgactgaccgatagtgaaccagtaccgtgagggaaaggcgaaaagaaccccggcgaggggagtgaaaaagaacctgaaaccgtgtacgtacaagcagtgggagcctcttttatggggtgactgcgtaccttttgtataatgggtcagcgacttatattctgtagcaaggttaaccgaataggggagccgaagggaaaccgagtcttaactgggcgttaagttgcagggtatagacccgaaacccggtgatctagccatgggcaggttgaaggttgggtaacactaactggaggaccgaaccgactaatgttgaaaaattagcggatgacttgtggctgggggtgaaaggccaatcaaaccgggagatagctggttctccccgaaagctatttaggtagcgcctcgtgaattcatctccgggggtagagcactgtttcggcaagggggtcatcccgacttaccaacccgatgcaaactgcgaataccggagaatgttatcacgggagacacacggcgggtgctaacgtccgtcgtgaagagggaaacaacccagaccgccagctaaggtcccaaagtcatggttaagtgggaaacgatgtgggaaggcccagacagccaggatgttggcttagaagcagccatcatttaaagaaagcgtaatagctcactggtcgagtcggcctgcgcggaagatgtaacggggctaaaccatgcaccgaagctgcggcagcgacgcttatgcgttgttgggtaggggagcgttctgtaagcctgtgaaggtgtgctgtgaggcatgctggaggtatcagaagtgcgaatgctgacataagtaacgataaagcgggtgaaaagcccgctcgccggaagaccaagggttcctgtccaacgttaatcggggcagggtgagtcgacccctaaggcgaggccgaaaggcgtagtcgatgggaaacaggttaatattcctgtacttggtgttactgcgaaggggggacggagaaggctatgttggccgggcgacggttgtcccggtttaagcgtgtaggctggttttccaggcaaatccggaaaatcaaggctgaggcgtgatgacgaggcactacggtgctgaagcaacaaatgccctgcttccaggaaaagcctctaagcatcaggtaacatcaaatcgtaccccaaaccgacacaggtggtcaggtagagaataccaaggcgcttgagagaactcgggtgaaggaactaggcaaaatggtgccgtaacttcgggagaaggcacgctgatatgtaggtgaggtccctcgcggatggagctgaaatcagtcgaagataccagctggctgcaactgtttattaaaaacacagcactgtgcaaacacgaaagtggacgtatacggtgtgacgcctgcccggtgccggaaggttaattgatggggttagcggtaacgcgaagctcttgatcgaagccccggtaaacggcggccgtaactataacggtcctaaggtagcgaaattccttgtcgggtaagttccgacctgcacgaatggcgtaatgatggccaggctgtctccacccgagactcagtgaaattgaactcgctgtgaagatgcagtgtacccgcggcaagacggaaagaccccgtgaacctttactatagcttgacactgaacattgagccttgatgtgtaggataggtgggaggctttgaagtgtggacgccagtctgcatggagccgaccttgaaataccaccctttaatgtttgatgttctaacgttgacccgtaatccgggttgcggacagtgtctggtgggtagtttgactggggcggtctcctcctaaagagtaacggaggagcacgaaggttggctaatcctggtcggacatcaggaggttagtgcaatggcataagccagcttgactgcgagcgtgacggcgcgagcaggtgcgaaagcaggtcatagtgatccggtggttctgaatggaagggccatcgctcaacggataaaaggtactccggggataacaggctgataccgcccaagagttcatatcgacggcggtgtttggcacctcgatgtcggctcatcacatcctggggctgaagtaggtcccaagggtatggctgttcgccatttaaagtggtacgcgagctgggtttagaacgtcgtgagacagttcggtccctatctgccgtgggcgctggagaactgaggggggctgctcctagtacgagaggaccggagtggacgcatcactggtgttcgggttgtcatgccaatggcactgcccggtagctaaatgcggaagagataagtgctgaaagcatctaagcacgaaacttgccccgagatgagttctccctgactccttgagagtcctgaaggaacgttgaagacgacgacgttgataggccgggtgtgtaagcgcagcgatgcgttgagctaaccggtactaatgaaccgtgaggcttaaccttacaacgccgaagctgttttggcggattgagagaagattttcagcctgatacagattaaatcagaacgcagaagcggtctgataaaacagaatttgcctggcggccgtagcgcggtggtcccacctgaccccatgccgaactcagaagtgaaacgccgtagcgccgatggtagtgtggggtctccccatgcgagagtagggaactgccaggcatcaaattaagcagtaagccggtcataaaaaccggtggttgtaaaagaattcggtggagcggtagttcagtcggttagaatacctgcctgtcacgcagggggtcgcgggttcgagtcccgtccgttccgccacttattaagaagcctcgagttaacgctcgaggttttttttcgtctgtatatctattattgccagaatcgcaaaaatcctctgcattttacgctctttttcctcaacagtctgaagcccataatcacctcagttaacgaaaatagcattaaaagaggcatattatggctatccctgcatttggtttaggtactttccgtctgaaagacgacgttgttatttcatctgtgataacggcgcttgaacttggttatcgcgcaattgataccgcacaaatctatgataacgaagccgcagtaggtcaggcgattgcagaaagtggcgtgccacgtcatgaactctacatcaccactaaaatctggattgaaaatctcagcaaagacaaattgatcccaagtctgaaagagagcctgcaaaaattgcgtaccgattatgttgatctgacgctaatccactggccgtcaccaaacgatgaagtctctgttgaagagtttatgcaggcgctgctggaagccaaaaaacaagggctgacgcgtgagatcggtatttccaacttcacgatcccgttgatggaaaaagcgattgctgctgttggtgctgaaaacatcgctactaaccagattgaactctctccttatctgcaaaaccgtaaagtggttgcctgggctaaacagcacggcatccatattacttcctatatgacgctggcgtatggtaaggccctgaaagatgaggttattgctcgtatcgcagctaaacacaatgcgactccggcacaagtgattctggcgtgggctatgggggaaggttactcagtaattccttcttctactaaacgtaaaaacctggaaagtaatcttaaggcacaaaatttacagcttgatgccgaagataaaaaagcgatcgccgcactggattgcaacgaccgcctggttagcccggaaggtctggctcctgaatgggattaagcctctctgacagctcctccgggagctgtttttacatgctcgctaaggaaatcgataaaagcccggatgcgcgtacttaccgcacggtcgctgtaatagacggcactgaatggcatttccactggcaacactttatctgccattaactccaccaattctccgcgagcgatttctttgtcgatcatgtagtcggacaaacacgcaatcccgttgccactcaggcaaagctgtttcagtgtttccccactattggatgacaaaccgtacttcacctcatgtaattgtccatcgctacgggctatcggccaggtattgagggaagcggcttcagtgaatcccaggcaaatatgttgctttaaatcgtcgatcgtttctggcttcccgtagcgggaaatataatcgggggaggcgataatttttcgataactgttaaataacggcctggcacgtaagctggaatccgttaacgtactagcgcgtatcgcgacatccacttttctttcgatcaaattaataatcgtttcggaggagactagcgacaaagtgacttccggatagcgttcacggaaaggcttaattaacggcatcagaaagtgcagcaccactggagttgcggcatcgatccgtaacagtccacgcggtgtattacgcgtctccataatttctgattctgccgctgccatctcctgcaaaattgactgtacgcgacgaaaataacgctcgccttcttccgtcaggctaagttgtcgcgtggtccgattaagcaggctaacgccaagtttcatctccagctttttcaccgcccggcttaccgctgagtttgcttgccctaattgttccgctgcccggctaaagctgccgctttcgacgaccgaaacaaaaatggcgagttcttccgacgtggctttcatttttgctcctgttgcaaaatagaagagatattttgaatttatttgtcattaaaccatcaggatgcgtgatatgtcatgcgatttaatgttctccataatgagcaaaattctgaccggtgtaagcacttgcttacataacaatatacaattgctcgttgaaagagtgagctaaaatccctataacagtagaaccctcccgagtgcggaagggttgacgtaatagaggtttcaaagtcaaaagtgcgaaaaaacacctatgccatgcgctatgttgccggacaacctgcggaaaggatcttaccgccggggtcttttgcgagcatcggccaggcattaccacctggggaaccgttaagtaccgaagagcgtattcggatcctggtgtggaacatatacaaacagcaacgcgctgaatggttgtcggtattaaagaactacggcaaagatgcacatctggtgttattgcaggaagcgcagacaacgccagagttagtacagtttgcgaccgctaactatcttgccgccgatcaggtacccgctttcgtgctgccacaacatccttctggcgtaatgaccctttcggcggcacatccagtgtattgctgcccgttacgtgaacgagaacccattttgcgtctggcgaagtcggcactggtgacggtctatccattacctgacacccgcctgttgatggtggttaatatacacgccgtcaacttcagtctgggcgtggatgtctatagtaagcagttacttcctattggcgatcagatagctcaccacagcggcccggtcattatggcgggagatttcaatgcctggagccgtagaaggatgaacgcgttatatcgctttgcgcgggaaatgtcgctgcgccaggtgcgttttaccgatgatcagcgccgtcgggcgtttggtcgcccgctcgattttgttttctaccgtggtctgaacgtcagtgaagcttctgtactggttacgcgcgcttccgatcacaatccgctactcgttgaattcagtcccggcaagcctgataaataaggtatgtcaggtctgccacagggcagaccaacgtttggcgctgcgcaaaacgtgagcgcggtggtggcgtatgacttatctgcccacatgctggatgtcgtggcacaagctgccgaagcccggcaactgaaaaatatcaccacccgccagggatatgccgaaagtctgccatttgccgataacgcatttgatattgttatcagccgttattctgcccatcactggcatgatgttggtgcagcactgcgagaagtgaataggatattgaaacctggcggtaggctgattgtgatggacgtaatgtctccgggtcacccagtgcgcgacatctggttacagacggtagaagcattacgcgatacctctcacgtacgaaactacgccagcggtgagtggttgacgttaatcaatgaagccaatctgatagttgataatttaattacagataagttaccgctggaattttcttcatgggtcgcgagaatgcgtacgccagaagcgttagtagacgctattcgcatttaccaacagagcgcatcgacagaggtgagaacgtattttgccttgcagaatgatggctttttcaccagtgatatcatcatggtagatgcacataaagcggcataaataaaaaaggcaccgggggaatcggtgcctttttattatctggtttgtcaggaatctggcatgttgttgtttttcacaaacaacgtcagcttatcgcctggttgcagattcgcagtgtcgctgttccagcgcatcacatctttgatgttcacgccgtggcgtttagcaatgcttgaaagcgaatcgcctttgcgcacacgatacgtaatgctatcgctgttgtttgccagtcgctgtgcgctactgcctgcaccaatcgtcaaactttggcctggcttcagcttagatccgcgcagtttgttccactgctgcaaatctttggtgcttacgccgagacgtgaagcgatacttgaaagcgtgtcgccagagcgtacggtgtaaacacggctgttaagcggcgtattgtcggcaaccagcgtcgactgtacagcagcaatttcgcctgaagccagagattcacgcagttgatctgcatgcttctttggcaccatcacgtactgcgggccacttgcgcccagcgtggagccttttacgccagcgttgaatgtcttcagcttgctgacggaaatccccgccatatctgctaccttcgccatttcaaccgggctgctcaggtgcacacgcgccagagcacggctttcatcggtcgttggcagacgtacgccataacgcttgctgtttttgagaatatcactcaatgccagcattttaggcacgtactgcttcgtttcctgcggcaacggtaacgaccagaagtccgtggatttcccacgcgctttgttggttttaattgccttcatgacccgaccttcgccgctgttataagccgctacggtcagaagccagtcgccgtcaaacattttgttcagacgctgcatcatattcagcgcggcagttgttgaagcaacaacatcgcgacgcgcgtcataattgcgggtctgtttcaaaccataattgcgccccgtgctcggaatgatctgccagatgcctgcggcattggcgccagacgttgcgtgaggatcaaaagcgctctccactatgggtagtagtaccagttccataggcatgttacgttttttaacttgccctgctatccagtacatatacggctctgcccgtaaagttacatcgtggagatagctcttattgcgtaaatatttctgtttctgttcgcgaatccggtcattttccggaattcccatctttagctcgtcgccaatgaaagcccacaagtcaccatctggcgcgatagacgtcccatcgtccatccatcgtgcctgacttgtaaactttgctgcttccccttgaccagctgcagaaaggctctgtgcgtgctgttgaacgttgccggtactctggcaacccacgagcaggacagaggcgagtaatatcgcttttgccttcatgtgtgtgtcaatagttgcttaaaagacgaccgatcataacggcgaacggagccgatgacaagaaagttttatcagaacctatctttctttgaccttaaccatgcaaaacgctcttcaggttgttgcaataatgtttcttcattaattacattaattaaatcaatatcttccgttcttaaaaaaacattaatttgccgctcatttttcagaattacgggtagtgttatttgattttttgcccgtaactccttaactttacgataataatcatttatggacaaatcgtgcggaagaatactcaaagcaaacttcatatttgataaggtatattcatgagcacaacataccaatgtatcgtcaggtaacgcacttaactttttaagtgattgatacatttgtgatgctgtcccttcaaacaaccgaccacacccaccagaaaacagtgtgtcgccgcaaaatagataaggtttactgaagtaacagatatgtcctaaagtgtgacccggcgtagcaattacactaaattcatgccccaaaacgaaggcagtttcgccatctttgactacctgtgttgttcccttatcttgtgtctcttgtggaccatacaccacaatttgtggaaacttttccaccagttcttttacgccgccaacgtgatcgtggtgatggtgggtgagaaatatggcctccggttgccagttattggcggcaatggcgtttaatactggctctgcgtctccgggatcgacaatcaggcagcgacctgcttcatcattcaaaacccagatgtaattgtcatcaaaggcgggaatactgttaagattcatagattacctctcagtgtgaaacggaaggttgtgatgaaaccggcaagagtccctcaaactgtcgtggctcctgattgctggggcgatttgccctggggaaagctttatcgcaaggcgctggagcgccagctcaacccgtggttcactaaaatgtatggttttcatctgcttaagattggcaatttaagcgcagaaatcaattgcgaagcgtgcgcggtttctcatcaagtgaatgtttctgcgcaaggaatgcccgtccaggtacaggcggacccacttcatcttccttttgccgataaatccgttgatgtttgtctactggcacatacattgccgtggtgcaccgatccgcatcgtttattgcgtgaagccgatcgggtattgattgatgatggctggctggtcattagtggcttcaatcccatcagttttatgggattacgcaaacttgtgccggtattgcgcaaaacctcgccctataacagccggatgtttactctgatgcggcagctggactggctctctttgttgaattttgaagtgctacacgccagccgtttccacgttctcccgtggaacaaacacggaggaaaactattgaatgcgcatattcctgcgcttggttgcttacaacttattgttgcccggaaacggactattcctttaacgctaaatccgatgaaacagagtaaaaacaagccacgaattcgccaggcggttggagccacccggcaatgtcgtaaaccacaggcttaaacttcaacttggtagcctgtatcttccagtgtgggattcatcgccgcggcacgagccagttcatcacagcgttcgttttccgggtgtccggcatggcctttaacccattcccatttgatttgatgctgccccaatgcagcatcaagacgttgccagagatcgacattttttactggttttttgtctgcggttttccagccacgttttttccagttatggatccactgggtgataccctggcggacatactggctgtcggtactcaaaatgacttcgcaatgttcttttaacgcctccagcgcgacaatagcggccatcaactccatacggttgttggtggtgcgggtgtagccagcgctaaaggttttctcgcgtccgcgatagcgtaaaatagcgccgtaacccccaggtcctggattgcccagacacgaaccatcggtgaaaatttctacctgtttaagcatctctggtagacttcctgtaattgaatcgaactgtaaaacgacaagtctgacataaatgaccgctatgagcactgcaattacacgccagatcgttctcgataccgaaaccaccggtatgaaccagattggtgcgcactatgaaggccacaagatcattgagattggtgccgttgaagtggtgaaccgtcgcctgacgggcaataacttccatgtttatctcaaacccgatcggctggtggatccggaagcctttggcgtacatggtattgccgatgaatttttgctcgataagcccacgtttgccgaagtagccgatgagttcatggactatattcgcggcgcggagttggtgatccataacgcagcgttcgatatcggctttatggactacgagttttcgttgcttaagcgcgatattccgaagaccaatactttctgtaaggtcaccgatagccttgcggtggcgaggaaaatgtttcccggtaagcgcaacagcctcgatgcgttatgtgctcgctacgaaatagataacagtaaacgaacgctgcacggggcattactcgatgcccagatccttgcggaagtttatctggcgatgaccggtggtcaaacgtcgatggcttttgcgatggaaggagagacacaacagcaacaaggtgaagcaacaattcagcgcattgtacgtcaggcaagtaagttacgcgttgtttttgcgacagatgaagagattgcagctcatgaagcccgtctcgatctggtgcagaagaaaggcggaagttgcctctggcgcgcataaatacctgtgaaaggcgctaaaaatagcgacttgggcgatttttgcagcaaacgattcaaaagatgagaaaaaccgttgacgaaggtcgaggcaatccgtaatattcgcctcgttcccaacggaacacaacgcggagcggtagttcagtcggttagaatacctgcctgtcacgcagggggtcgcgggttcgagtcccgtccgttccgccactattcactcatgaaaatgagttcagagagccgcaagatttttaattttgcggtttttttgtatttgaattccaccatttctctgttcaatgattttactctggcgtaggtgcgtgattctcgcttgttgtctcattcattaaaattcaataatgatatcgaaccattcagcttaaatatatttctagagaataaatttatattgattaaatgaatgtatatttcaaattgattttgtttgttattatttaagtgaggtatataattagagtccgttatcaatgctaaatattctaatcattatgacaggcgagggagtgtccaattatgaattcaaaaaagctttgttgcatatgtgtgttattctcgctgcttgcaggatgtgcctctgaatcttctattgatgaaaagaagaaaaaagctcaagtcacacaaagtaatattaataaaaacactccccagcaactgacagacaaagatttattcggtaatgaaaccactctggccgtatccgaagaggatattcaagctgcgcttgatggagatgagttccgcgttccccttaattctcctgtaatacttgttcaatccggcaaccgcgcaccggaaaccattatgcaggaggagatgcgaaaatattatactgtttccacattctctggtatcccggacaggcaaaagcctctgacttgtaacaaaaacaaagataaaaatgagaacgaggatgttgccagtgctgagaatatgaactggatgcaggcactgcgttttgtggctgcaaaaggacatcagaaagcgattattgtttaccaggatatgttgcagacaggaaaatatgactctgcgctgaaatcaacagtatggtccgactataaaaatgacaaactcactgacgctatctccctgcgctacctggtacgtttcacgctggtggatgtggcaacaggtgagtgggctacctggtcgccggtgaattatgaatataaagtgcttccaccattgcccgacaagaatgaagccagtacgactgatatgacagagcagcaaatcatgcaacttaagcaaaagacctataaagcgatggtaaaagatttggttaaccgctatcaataataaattatatctgccgccaggaatttctggcggcaataatacaaaattctttgcataagaaatttttcttgacaaagacagtgcaagaaaggacatggaatccggagttaaaaactgtttgttttagaatatttaattatttaactgctgaatcttccttgcgagaaatatatccattattacatttcatgccatttttaatatagattgctcctgggaaaattcccgtattattaccgcaggggtgataattagtattgacatatcctgtgacaaaaggagctattaaaggtgctattacgatagctattagtaaaaatataagagttagctgtattgttatgtctgtggcgaaattgactaccttcgtttttttgattaagaatgattttattatcgtaagtaaaattacatgaatatttaaaaaggaaaacgacatgaaaccgaagcacagaatcaacattctccaatcataaaatatttccgtggagcattttattattgaatatagaggtttaactccggtaaaaaacaaagaagcattgaatgcagggaaaaataatatggccataaaaaacatcgaaagaaactcttttaatttaacatgtaaacgcatggttaatcctcatatcacgggtggagtgttaagaacatacataaatggagtcatgttttcccttttccatttatcaagttcctgttgccgttttagtccatctctaattgcatattttaatttttctgataaatggcattgagcatcgatttcatttaaaacaactgtacacactatccctgtcagtaaaattgctcctccgacaagaattactggaaagccaaagctaacacaggcaaaagaagccagacttccaatagcggttgcaacaccaccggctataactgctttggccacatccattgaaaaatcgccaagaaaattaaccagatctcgctctgaactcataataaattctatggttctccaggctactgaaaaccagatacagaacttaactccttttattgattcagataaagctcctcgccagccaatagcgagttccagaacttgaggcgctcgtgaagagaaaatatatttaccgagcttttctaaaagccaggggctggatgttgtgatttttatatatttctctccaagtatttcaaagtaacttgcttttgtatactttaaggcattaaggttaaatataattttcccattgtcatcaaactcagtcattaatttacccgcgttaactaaccaggcgagtgtatcttttatacctgaaggatgtgtagtgataaaatgaatgtaatcaaatgatgttattgggctgagtattttttttgcaacatcaagtgtcaagagaataacatgatgagtgttctgatgccttaactcatcaatgagtgggacgtcgttaagataagggtgctgaggtactagctggtttatcggctgagccccccgaagaatgtcacccacataatcagcccactgtgcattctgtgtgttgttgttattccttaaaccagccattttatctctccgcaatagtaatttattatgttattacagtaagttactgtacacgatcctgccatttactcattgcattcgtaccggctaacgtatgctcccaggaaatatcttcataaataaaggcaattctctcctgtggttccagttctttttccaggacagcatgcggtgtgacaaaatcaatacttgatattcgggcttttgacagatttattttataataaggctggtaaatacccgctttactggttcggtagagtataaattcacatattgccattttttcattgtcactaagtgcttttgccagcaatggtgaggatttatcaaccggtttggtgataattaattcatgatgattgacattttgacttcttgagatggaatgcattaacgcataaaccatgatctgatctttatgttctggctgcgctttgtttccgacagaatcaagcgttgagcaacctgctgaaattagcccttgtgtctctccactcaaagataaataacttatatttgccatgataatctcctttaattaaataattatttttcggccgtggtaccggttgccgcctctggcatgacgttattcttcagcagcagccagcggcttaacacgccttcgagtcgctcattaatttgtttttccagcgcatctgtattctgcttctgcgcacgggcatcatggtactgcgtcaacagagactcaacgggtgtttcctgccccagtccccgctccgcctgccagatgacatttttgatataggaaagggttagtccctctttctcgcgctgcatcactagatctgcaaaagcatgtaagtcctggcgggtctgcaaccagccacgcaactgcgggctactctgtgcgcgggttttgagtgcctcattccattgtgtcgaggcctgttgctgttgcaggctttccggccagcgactgtcggcaacacgcatcatctgcatcccggtttccagcggctgtaccggggaggtatcaagaagttgttgcagcctgcgctcatagttttcgagttcaggtgaggccatccacaccgttgctgcgccctgagcggtgtcgttaacctgtaacagttgctgctgcaccggatagacctgccaccaccacaatgctgaggcgacagccactgaacaggcgatccctgcgataaaccctcttaccgtactgccttgctttatcacactggcctgtgggggattctctgtcagactgcgcacttccactttcatctcaggcaggccgggcaggggaggcactaccgcttctggtgtggaagatgcctgtgtttccggggcataaatcagcgttctgaccgtggtctgtgcggcgttctcagtgttactcttcagctggggttcaagccgtttacgcgtgttctgcataaaatagagcagattctccacgcgcggaacgcgcttcagttccacctgctggagcttatcgcagataagctgcaatgcccgctctgtgcggtagatcagtggtaggtcggattccgcaaaggagatttgctgacgcagaatattgccggttcgggagttaaaccagtccagcatttcagtacgcgccgggccgccctgcggccagaacttatcccagtcgtggcttaccattgccgccagcagttccgcaccttcgcagaatcccgccagtccctgtgtccgtgtccgggcaagcgtatagtaggtggcggtgtgtaaatccacaccgttggctttaaaaatcgccagcgccagcgactccaccagtttccagttcagctcaggctgtgacgggtggctggctttgtttatttcctcgcggatggcgctgaattccggcagcccgcgcgggtcactgccggtaacgatagtttgtgtcagtacgttactattcatccctgcctcctcagtacagtgtgtctgacagaccaaactggctgaacaacccaccgctgaacgggttatcttccgtgtcggtatgcacacggtaggtcatcgcgccaccgtccacgctaaagcgcacggtaaagttgccatcctgtactccggtcagttgtccggccccgaacaggcggaactgcgcccacggcccgctgaagctgatactgcgcggcgcgttgccgctggtgccgatgagcgtcagcttactttcgttgccttcgcgcatgttgttaggccagaccagatgggcggtatagttacggccctggctgtaatcgactaactgaccgtcaaggttcagtacactgcggcgtttattgcctgaaagcgataccgtttccacggcaaaggatgttcccagaccgttctgtttgctgaagaagatgtcacggattttctgcgcagtttccagttgcgcaataatatcttcgcgaataatgacgttgttatcgccatcctccagactcaggtcattatcgataaacagcttcaggttctgctggtagaaggtatccagtatgccatccggtttaaagaagcgttcgaaggcatccagtgaggcatcctgtgcagaacgcggattaaacggatagttatttgccagttgctcgttaaacggtttcaccacgctgtcgcgccagtccacttccatataatgaacagcctccaccatcaccacatgccaggcctggtcagtcagtctgccaacccagcggttgagcggagcaggcagcgtttttgccatctggcgggtggcgaatatcggatcgctgctgttctgatcaagccgtaactgcacggctttcagcgccgatttccctggtacaggcgcgttctggattgccagcaggtagcggtgcaactcggtgagttgctgatacacggcctgcatcgtgctttctttgtctttctgtactgccagggtactgttttccggggcgaattcatgcccgaggcgggtgagtaactggtaatccggctctgccagggcttcctcccgctctttggcagagagtttttcagaaaagacgcctggctgtgtgttgtcacgcaggacggtcagcgcccgctgcaaaggctggtcgccgctgataacctgctccagcgccccggtcagttgtccgatggactcaaaattgcggatattcagattgtccatcccggcccgccaggtggcggtgtagtcgctgatatactgctcggtcaactggcgctggatttccgcgcggtcggcgtcactgtatttcacgctgcgggtaaggttaagtacccaggaatccatcgccgtcagttcaaccagttcatcgcgctgttttacaaaatagctttgcaggccgtaacgggtaagaaactgtggaacaaccagtttgttgtcatcggcagatgtaaacacctggtcaaaggttggccctacctggtcacgcagattgaggtcggcaggaagaacgcccagcgcccgcgttttcaggctctggtaaacccgctggtagacaggcagtttgctcagttctttctgtgctgataccacgggcttgtcatatggcgtccagcggctgatggcgtcaccgtcgcccgcctgacgctctgcatgccagtcagtatgagccagcgcgtagtcaagatgggacatcagttgtgcctggatatcgcgctggccgtggaatttttcgctccagcgttttgccatatactgcttcaccacctcattgttacgtccgcttttgtcctccagcattcgcattacgcgcagcaccgcgagtttttcttcactctccggcggcgcggcgttcatcgctttgaccagcccgttaaacagcgagggcaggtaacgttgctccagcagttgcagataggtctgttccacataaggcccgatacgtcgtccctggtacagtcccatatcggccagacggctgcggtcgccccagtcgccataggccagtgtggcatcgcgtaccgggttcagaagcggcagttgcaggttgccaaagtcatcttccccctgcggaggcggcacgtccataaaggctttggcctgcttaagcacggtgatgccggactgatagttaccgttgtaatagtgatgccagccggtgatgagcagaagtgctgccacgccgcctgtggcagagaaaactgtcaggcggcgacgggaacgtatcagccaggcgcggctctctgttgccagattaggctctgcgagtaatgcctgcgggaacaggctgcgggtgaaataaggcgcggtgtccaccaggggccaggacgccagtgggttattgcccagccggtactggcgggcggcagactgggtgaatatatcatccatctgcccacgctgaagcgaagaggtgagatagacaccacgcagcatcacgttcatattttcgccatcaagcagaccctcaagcagtgacaccagcggttcacggcttccctgcatctggcgggaaaaactgaataaagacgtgcgggtgtgagtctgagcgaccatcagatccggcaacgccagattcattcgatccacccatgtctgccagaaagcattcaactctgttcgccagtcatcattttcatgggcgcggcgggtgaacgtgacgcccagaatcgcatcgcgatcctgtctgttcagtgactggaacagggcggcaaaaccctgcaataaatcaagccgggtgagtaccacgtaaaccggtaactggcagtgaagatgctggcgtatatcctgcaagcggctgcgcagcgtctgtaacagatgctcgcggcggcgtttgtctgcggtaagcagatcgggtaaatcgagtgtcagaataatcccgttcagcggctggcgcgcttttctttcagccagccgagggcatgttcccacagacggcgatgcaggatatccgcatcagcgggagcgcagagtgtgccgtcgatatcaaagatcaccgcctgtttaccgacatggggcgtaaggtacaggcgttgttctgcgccgcgcgcgccctccggggcataaataatgtcggacggaaacccctcgcgcagcagtgtcgttttgccactgcccgccgggccgatgaccatataccacggcaactgccacaggaaacggcggttgtcgagatagcgttgcaggcgcagcagccagcggtcaagataacgctgctgggcgttcagttccacgctgagcggatcaacggcttcctcgcgctgttgcttttgcattttttcaagctgttgcaggcgcttcatcacccggacggtaagccacatcagggcaataatcccccacgccgccgttgccagccagcggttcgccagtggtttgagccactgttcttcatacagcgtccacgtcgggcctttccaccagatccacaccagcagaaaaatccacgccagtatcagcagccagaaagcagagactttaaaccggggcatcgccggtcgcagggctgatttgagtccgctgagtagtcggggtgttggtaatctgaacacaaaaactcctgttctcttttattgttctgccgtgaatttttgttctagctgctcaagcagggacggctcccagtctgccaccatcatctgcaatcccatcctgaacaacatccggtactgctgctgcgcaagctgtaccagccccgcctcttccgtcaactgtgcggcaaggtactggcggtgaaactgatcgcggggatcgccttcgggtagcatgtccagatatcgcagcgccgcctccagaccctgctcagcaaaacaggctctggctgccttcgattcctcaccgatttgcgcaaccggtgcaactttggcgtcgggcgaagctgccagccattgtttcgtctgctcactgataaacggtgtgtggtcattaaacagcagcccggtaagctggggcagacgctcaaggaagcggatgacctcatcgcggatggcgtctgccacctgtttgtaacccagacgcagcgccgtctgtgcagaaaggcagtgaccatccagccagtaaggagccagcagtacgcttttctccacctgctgccacagcgccatatcggcactaccgagctgagcatggtaatctgccaccatatcggcggagaccgcagccagtggagtacggccatcgctttccgcctggggcgtactggtgatgttctgccaaagcgcatggcggcgcagacggtagccctgcggtgaatccggctggcgttcacataaaatggccgccacttttaacagcgtgtcgcgccaggctttgtcgtcgtgactgtcgatgacgatttggggagccggagcactgggttgcgtcacgccgctttcagacgtggcggtggtctgtggtgaactaccggaggccgccggagtggggacaggagccggtgccgcacgattaaacgcacgctggtacagggcaaaaagatcatcagtagcctgtgccagttccggggcgttatgtgactgccagcattgcgccagttttgccagttcccctgacagcgcatcgcgctgctctgtggcggcgttctgtgaaaaaccttcaatacctgtttcaaagcgtttaatgacctggctggcaaagcgttttttatgcgccatattctgcggcgcagccaccgcccagtaatgctccacatacagcgccagcaggcgcaatgcgagatgaggatcaccggcgtgttgcagggttctcagcagatgcgccagcagacgaaaatccttactctccgaagccagaatgaccagcccccggcgctggagttccgggatatccagttgactgtgggccagcgatcccagcttgacgatttcgccgtcgatatactcccagttcgggttgtcatctttcagcgccgatgccagtttctcttccggcaggttttccagcaggtgcgatatccagacattcggatcgcgtaagtccattgccatatttttattctcccgcccagtggcaggcatcgcgcaggggagcaatcgcccttgccagcccgtcaatgttaaaggtcagctttccggcggcattgtctgcgccggtatccaccgtcagcgtttttgcgccgaacagttgcttaatttcatcaatcccggataacccccggctggactccagcagggtgccgttctcgcgcacaaaccagtggctgcgcaatgcccggttgtcggcattcagagtgacggcgatatcatggacatccagagggtgcatcagcgccacctgcatccgggtgatattgtccacgcaactgaacatcagcaccgggcgtggcggaacatgaccgatagccggggtggttatcaccaccgtcgggcgctcccccggcacctgcgtcaccagcagttctgtggtgttgccctcgcggcgtttttcctgctctgtggcgcgggtccaggcctcgcccacaaaaccggctttgaccagcgccccgtcaaaccctgacggggacagcggtgccagcaggcggtcatagcagtcaagccgctccagcgccgcggactcccgccgacaggactgtatggcctgtaacgtggctgtcgcatccggcggggtcgtggtggcgacggcgaccgccacaccggccattgacgatgcttctgcgggcgcggcagtggcgggtaagcccgtcatcaggcccgcgataaaccatcctgtctgccggaaaacgcgcaacctgctcataaaaccgtttcatcctttgtgacggactcgtcgttctgagcatcttccacgtctgccgtaaatgtgccgtccactgccgacaaccgaatccgggcaatcgccgtgttagccgccattttctgcaacagcagcagcgagagcggcggtagcatgtcgccatcgatgaccgattccagcatcctcgcgccgttttccgcgcgggtgacgcggctcatgatttcgtccgtcacttccggttcaatgaccacttctgcaccaaagcgactgcgcagcacgttatccagacgggccagttttccggcgataatggtggcgagcgtctctttcgacagcggcagatacggcaccacttccatacgcgccagcagggcaggtttgaagaagtcggccagcaccggatacagtacttcctgcatggtttccgggtcatcggcatgctcgactattacctggtagccgaggttggacgtcaggaagaagacgatatttttgcagtcaatcaggcggccttcaccgtctgccatttcgcccttatcgaacgcctggtagaacaggttgagcacatccgggtgcgctttttccacttcatcgagcagtactaccgagtagggtttctgacgaatcgcttcggtcagtacgccgccttcaccgtagccaacgtagcccggaggcgaaccaatcagccgcgagacggtgtgtttctcctggaattcggacatattgatggtggtcaggtactggcgaccgccgtagagcagctctgccagttgcaggacggtttcggttttacccacaccgctggggccagccagcaggaacgcaccgagcgggcgtcccggacgacgcaggtcggcgcgtgcggtcagtagatgcttatgcaggctggcaatcgccaggtcctggcctttgatggtgtcacccagccatttcgtcaggtcggtgatgaccgacatttcattctgcgacaggcggttgagcggcacgccggtccattcggcaatcaccgccgcaatctgttttttatcgacgtgcggggagaccagcaaccggtcgttatgcagggcgtccagttcggcagtgagctgggccagccgctgtaccggggaaactgtttcagcggtctcttccggttgttctctgtcggcctcatcagccggtacggcaccggtattatcctgttctgactctgactctggctgcgtatcctccacggtatctgcgtccggcaacggcgccgcatcgtcctctgccacgcccagtaactgctggcgcagcgcgataatctcccggaccagcgtctgctgctggtgccaggccgcttccagttcatccagcgccgtcagcgtttcatcatactgcaccagcacctctgtcatccgtgatgtgtcggtacgcagtccgatgcgaagctcgcgctcaagctggcgaatttccgcctcctgctggtggctcagagtggtcagcgccgagatttgcttcggcggcgacgacaggttgatggccacacgggcgcaggcggtatccagcacatcaatcgctttgtccggtaactgacgcccggagagataacgctcgcttaatgtcgcagcggcctgcaaggcgtcatcatcaatcagcacgccgtgagactgttcatagaccgccgacagaccgcgcagaataatggtggcttcggcagcgttgggttcgctgaccttcaccaactggaagcggcgcgacagggcggcatctttttcgaagtattttttgtactcgctccaggtggtggcggcgatggttttcagctcgccgcgcgccagcgccggtttgagcaggttggagatatccagcccgccctgctggttgcccgcgccaatcagggtatgtgcttcgtcgataaacagaatgaccggcaccggggaggaaatgacctccgccatcagccctttgaaacgtttttcgaattcacccttcaccgacgtcccggcctgcaatgcgcccaagtcaagggtcatgatatcggtgtttttcagcttgtccggcacctggcctgccacgatgcgcagcgccagcccttcaatcagtgcgcttttgcccacgcccgcttcgcccaccaccaccgggttgtttttacggcggcggcagagaatgtcgatcatcaggtcgatttcgtggtcgcggcacagtaccgggtcaagcctgccgttacgggcgtctgcggtcatgtttttggcatagcgggcaagcagggtgtcagaggcgtccgtcattgtgcctgcgcctttaccgtctgcatccggcacgactgattccgccgactcctgtgtccactgcacaaagtcctgttgcagacggtcacggttaatgccggtcaacagccgggcggcagcaggcggtatataacgcagcggcgaatgcagcagggccagcagcaacacgccgccgcgcagttcgctgtgctgcatctcagccgacgccagcagccagccctctttaagccactcaaccagcatcggggaaaacgccgggtagctgtccgcagaacgggcggttgtgtagttctctaccgtcagcgcctggcgcaactcttccatgccaatatcgccctggcgggtaataacccgcaggtcactgcgtggcatggcgagcatctgaatgagcacatggctgacggtaatttccgctgcctgctgactcatacattcagaggcggccatctccagcgcctggcgggagaacaggttcagccgttttaccagcgggggaagatcaatctggatcataaacgtccttatcgaagtaatttgtttagctggtgcaggatgtcctgcgtctggctgtccagccgcaacagatagaacaggtaaaacaacgccagcacgacaacgccaccacaaaaaatatgtttaacagtcaggcgactgatgagctgataacgcccgccctgggtttttttgtcctggtgtaacagcgggaaaggggcatcgccgcgcagtttatgcagaacgtggtacagacggcggtagatctgctcaaattccccctgatcctgtgctgccactttgtagcgcccgcgaaatcccagagaaaaacagatccagagaaattccagcagatcctggtaacgtttgggttcacggatcaggcgctccagcaggatgaaaactttctcgccaccccaggcttcgttgtggaaatggaccagcaatgactgcttgatccactcgttcttgtttgaccagccgttaccgagcgccgcttcatcaataaacgtgcagaggatgtagcgaaacgagataatcacgcccggttcgtagccctgctcctgaagcagttgctccacggcctgaacatctgtcaccacctgagcaaaaagatgctccggcatcgtctggctgttcatggttgaaaggcgcattaccataccgagtagcggcgtggccgcgtcgatcatcggattcaggctgttgccacgaagcgcgagatggtagttgcgctggcttttttcgtcgtgtccggtaaatggtggcagagacagtgacccctcatccatcgtcttaccctcttatcgcccacagttgcatgttcagatccgggaaactgccggaaacatgcagtgcaacggccccggcggcagccatttctgtccaggcctggccactcttgtcgagttcgaaatagctgaacccggaatggtaaggaagctggcggggagccaccataagggcacgcaatggaataccggggatctgcacactgaccatattgcggattttttccggcgaggaaattttcgactgctggataaactgacgctggatctgatcgaccggcacgtttgccgccacggccagcacaaaggtggcagattgcagcagttctgtgtcatggatatcggcctgccagataccgtcacgcagatgcagcggcagattgaccgctcttggcgacagtacggtatgcagcgcccgtttgacttccggtaacagtgttttaaatgttttggtcagatcatgatgatcatacacatcaagcgggcagggcaggcgcgacggctcggtaaaggtcatcagttcacccagcaacccagcaagatcaaggtagaaatcttccgggtggagctgggatcggcgggcgcgatgggtaaaccgggtctggttacggttaagtaactgcaacatcataaattccgccacatccgcgatgccgctctgcgccggagagccaatacggtttgccagatcgcttgcccgtccgccaatggccccctgtacctctttgagataaacacgcagtttcttactgacctgaatattctggcaggaggggataaaatcgtcatccaacgtcagggagccatcggcatggcgattgctgatacggcaaagcgggagcgtaatataggcgctcatatcttctgcaccgctcataatgcgcggcgtcagttgacccagcgtcaatgttcgcgcgtcaccttcttctgaatgcaaatcccggacatcggcataattcagccggtaacgcccgattcgccgtccgtcgctgatttcatttctcacatcactggcgaccggcagagcgaggtagatattgcggcttctttcgtccggaaaattttgcgggtgcagcggatcgggcagtgcgtcctggtcggggatagaaaagacggtgccgtcgggcagtgtgcctgacgcgctgtcaatcatgatcttaccctgcgccagcagttcattgttgagggtgagttcggtaaatccccaggataaatcattcatggcccggaaacgctggttatccaggtagtcgttgtaacgctgctgttgctggaaatggtgtgggcgcatcagcatcccttcctgccacatcaccttgttgcgggtggttgccataattattcatcctcttttttcatttcgatgctgctttgacgtacatgcaccagcaggcggtaatggtggccggttccttccaccgtctcgatttgtttccattcagtggcctggtcatcggagaaataggccacgacaccaataaactgcgttttctcatccagctttaccggcggcagggttttgatggtgtccggcaacaggttgaaatcctggtggtcgatatagtttttacccaacacatccggtagcggcgtactggctatctggtcatagtcggctgccagcaattttgagtcgtcagtcaggtacaccagttgcacatccacggcggctgattcaccctccgcattggtattggtgtccggttcagtcagcagggtgacggttatttccgaaggttgctccttcaggctcccgacctggatatccgggtttttgatcacctcgctgatttttttcgccgtttcgcagccggttaatatgacgcacatcagcacgcaggccagaaacgccttcctgttcatgcttccggctcccgctgtttttcacgaagcacccggtcatagacctgggcgtagacctcgttaaacagcatctcaaacccctgctggcgatcggaggccagttcttcgtaataatggctgtacatttgccatgctccggcatcatccagcggctggcgcagttcatggctgcggcggtactgcacaaagcggcgcagcagattttgtggtgagaaagcatccagcaggacacgaagcgactccacaatcgctgcccggttagcttcttcgtggtggcggacattgcgcaggctttcactgacggcggcgggagccgccagatgtaccgggcttttaccttcggcaaacattacgtcgagcgcggtggcgtaatccatgttcaggcgcagcgggttatcttccagcgggcgcaaatgtttgtctgagaggctgttacgctgctgctgcaaatcgagcagaccttttattgcggcctgtaacgttcgtccggcctcctccagaaaatcatccgcatcgtcggaattgctcatggtaagcgagccgccaagaccgcgcagtaagggggtgaccgcaaggtggcgttgcgccatttctgccgcagagacgtcgtcattacgatcgccggggctggcataaatgggcggcagatccataaacggagtattgatccccccattacttgccggatcggacagcggtgccgatggccggacagccgcaatgcctgaaagcggatcgcccgtggtaatcaggctttcggactgaagtgcctggagtggatcggcagaaaaaccgtttaccacggtgtctgcaagctggtgccggtgagtcattcccggatagtgtggcgcaccctccgttgatagcagggtatccgtgagcatatcgcgattggtaacgatggtttcgggagtggccatttcctcatcgtaatggggaatatctccccggttcagatgaaccctcaccatcagccgtccgatctggatctcatcgccctggcgcaactgtattaggtctgatgttgctgtgacttttgcctgattcagccacagttgtgccgtctgcgggcgcagacaaaatgtgccatcgtgcaggataacggtaaaagcctgggccggaatgctctgctgacgatcctgtaccgaccagtggcattcggggccatggccgacatttccctgctgtgtgaatagacagcgcgccgcccgcccgctttccagctcactgccgttaatgacctgcaatgaaagcgtctgtagtttctcttccggcatattctgctccgtgattatcataatttacgaccgtaccctgatggtgactgagggtcgttcttccggtgtgccgaggaagctggtccagcccagcagcgcacttttgttatcacccaggcgcattgcgcccatctgctccggcgccagccccagatgtaagtcccaggcaagctgatcgcgcaggatgaaggacacgaacatcgtcagtggcaggaagttttcgccggacggcagaaaagagaggaactgttttcgggtcaggctggtaatactgagctggaattttccgctgagatcgggcactcgtgtacccagaacaaagttgcccagtaccgatcttcccgccagtttttcgccatttttaagagaatagctccccagactattttgctgatccggttcaatatccaccttgcgacgttgccagttttgcagcgtcacttctgacaaatcaaagcagtgggacaccaggccacagattatttccggggatcgtcccggatttgccaggatcccggaatacgccagcattttgctgtgattaatcgccagcttatcgcgaagctggcggtggcccagcccgacaagggagtacatgcgctgcgagaacgcatccacaccgccgttacgaaaactgatgtgatagcggtacttacgccagatatgccagacaaactgggtcaggcggtggctgaacatatccagaaaatcacctaccggactttgttcatgtaccgctttccaggccaggtgatcgaggtaataaccggggagaggcgactggctcccctgtaaccccataaaggtggtggtcatcctgaatgcccctgatgtatcccgtttcagcgcactgatatcactgcacgggaaggcaaggctggcatcggcgctgaaacgcagggtttcctgtgccggatcgtcacgcagggataattctggcgtccccttttcaccctttgccaggcggtgcaacagctccgccatcgcaaaaaaattgtaagagcaggcattatggaaaacctgtgccagcggatcattctgctctttatctgccgggggatttcccggactcagataagaggatgctgcccgattctttccgtccatttccatgtctcctggctttctgtgttcacaacggtcagcatgtggaatgagttaacgctggcgtacagcgacagaaaatgcgaaagcaccgtaccgagcagatacatttccccttcacagacaaacggctccgggtgcagatacagcgtggaggccagtccccggacgggaatacccgtaaacaggcgatcaacggggcgggtctccagacgctcaatggcatccagcttttgttgtgacagccgtgccgtctgcggatgatggattgcgtggcgatcaaagttggcgatgacctgcttcagcgcgtccgtatccagtaatgacagataattcaggttcatggcggagagtagggaccagtgcaggctgccatcaatgaccggccagagtggttgcgtcgggcgggtaatgttgcgaaatgaagcaacagccgcatttttaccggttgtgccggtgatatcgccggaacgaatttgtgacggaagctcacggttggtacaggtcagcgataccgaaaccacttcattactgagcagagattcgtctgacggataactgccatcagcatgtataaaggcaagggtatgatcaaagccgcgatggaacagggatgttttggtccggtgatgccagtacaccacttcccgcttccggctgtattccatctgatggctgaaactttcaaaggctggccactggcgcgcggcctgcgtcgaaacaggacgccccagatcttttttcctgaacatatcctggacctggctcaccacactgttaacggaaaatacatcgtaatgttgtgggtaatggcggctgggaaccagcggatagtctgcccgccggttgtccagcgtgatggcttctgcatggtggataaataaattaatggcaggtgcgcaatacaggcgcagggaatcgcggcgcagccggatgtccacgggcaaagggcgcgaaaaacgcagttgcagggtaaagaattccgcctgcaatccgtcaggcaaagccggacaaccacaaagatcaaaaaagagaaacgcatcggggtaacagaaatactcctgaaggatccggtagccgctgtggacgtttttcggccagggcagcatggcatcctgcggctcaaaaccgacagcttttagcataaactcaggcaggcgaagatgctgttcacccacagtcaggtcggcaccctgcaagtattcgcagaaccataaataaagctggtcacgggtatagttgtcgtcattgccgagccagaagcgaagtttgttcagatccagcgtgcggaagtccgttcccggtgcgaccgaaaaggtgatgttgataacaccattacgggtcgtactgcggttttcaatctgctccaggcgaacgggcagcagccagatatcccggcagagggtgaaggtacagggaggcggctcctcctttttagcatcagagggcagcacttcatcaactctgatttccccggcgttggttgtaaactgctcattacgggggattaacaccggtacagaagacttatccatatccggcgtatattcaataagggtcattgccggaaccggacgcaggtaattaggccatagcatcttaataagcccgtgcgtcagttctgggaattcatcctcaattttctggcggagattgccggtaagaaaagccaccccttccagcaggcgttcaatatccggatccgcatctttttcggccaggaagcgggccagatggggtttttccgttgccagcagcttgctaagctggcgcaggtaatcgagttcttcccggaaatagcgttcttcaaattccatttgtcagtccacccggtaatgctggctgccattcggtgccatatcaaattcaagcacctcatgcgtttcgttaaatgtcacccaggctgtaatatgaaacgtcatatccagcgggctggaggcggatgaaaccactgcctgcacttcagcgtgtgagatccggggttcatagcgttctatacattgctcgatggcccgactcatggattcgcggaagttttcagccccttccggttcatcaatgcccagctcaggcgcaccccggcaactaccggaccgggtattaagaatgtttcgtaggttctggcgaatggattgcctgagcgaatgaatactgcctccctgccggtttctggccgaagaggcttccatacgctcaaaaagagaacctgtggttctttcccgatccggtatcatggtgtgttactccctgtctaaccggccaactagggaaagctcaaaatttgcccccataaatttaaaatgaggtctcacgcttagcgcaacctggtaccagccgggttcgccttctacatccataacctcaactttggcagcgcgcagaggtttgcggctgcgcacgtctgcaggcgggttttcctggtcggcaacatactgacggatccaggtattaagctctctttctaagtcgctcctttctttccatgaccccagttgttcacgctgcaacaccttgatgtagtgcgctaaccgattgatgatgaagagataaggaagctgcgtacccagcttatagttggtttctgcatcttttcccggaaagtgcttcggtttttgtaccgagtttgcagagaaaaaggctgcattatcagagtctttacgcatggtaagggtgataaaaccctcttcagccagttcaaattcgcggcgatcggtgaccagcacctcggttgggattttggcctgaatctgccccatcgtttcgaacagatgcaccggcagatctttcactgcgccgccgctttgcggaccgataatgtttggacaccagcggtatttggcaaaactgtctgcgatattgcatgccagcatccaggccgtattaccccacagataatcttcgtggttctggctgacatcttcgtaatagttaaagttcttaacagggttatctgttggtgaatagggctggcgaagcaggaagcggggtgccgtaagccctaaatagcgcgaatcttccgagtcacgcagggcgcgccatttggtgtaggccggaccttcaaagatggcataaagatctttgatattaggcagttcggtccacgagttcagccccataaactccggggaaacggaggacaggaacggtgcgtgcgccattgcgcccactgcactgacgtattgcagcagtttcatgtcaggcgcggtatttttgaactcataagcgcccagcacggcagcgatgggttcaccgccaaactgtccgaaaccggacgaataaacgtgcttataaaatccggactgaataatttctggcgcaaactcaaagtcttccagaagttcctgcttggtgacatgaagcacgttgaccttgatgttttcacggaaatcaacgcgatccaccatggttttcagtgagcgccagaacgactcgacctgctgaaaggcaggcgcatggatgatgacatccatctggcggctgatgcgttcatcaatatctgcaatcatgctgtccacgaccagtttattgaccggttcggcagatgcagtggattgcaggatgctggcaataaaggctgtcacaccctggcgggcaacgtcataaccttccgaaccgggctgaatacgggtctgtgccatgatttgatcaagcagcgacgatgcctgctcaggctgcccggcatgactggaaacgagttcctcttcctgtaaagacatactgaaaatccttctgttttagctgtgtttctgaaaccggcttttcgccatcagtgaagtacgcgctgccagtgcgacgcgctctgctgaaactcacaaaaatggataatctcatccaatagatcactgatacggcgatccagtgttgtaatcagcgcagccacaccatcctggttgatttcaacggacgggctgaaacatacctggtaaaccacctgcagaatgtctgcaacagagaggtggtatgtcccggagatatttttgtgtgccgtcatgcctggataaccctgtttaatgaaatagtggtggttatttattgctcacctggccgatttctttgagcaactgctcgcgggactcttcattttccagcaatgcctggagctgggtacggaatgccggaaggttacccatcggccccttcagtgcagtcagtgcttcacgcagttccagcaatttattcacttccggaacctgccgggccacgctatctggtgaaaaatcatccagtgacttgatattcagcgccacattcagctcatcgtccgttgtgcttcccttcagcgtggcggggacggtaaaattgaggccaatggctgcttcagccatcactgcaccgaaattgtgcttgttaacggaaactgcctgacgttcatccagtgaggatgtttcctgcgtatttccggtatcgccgacaacgagcatgttaagcggaagttccacttcagccgtctggccatctgtttttgggacatacgatatattaatacgttcgcgaggcgcgacgctgccttcaaattttttgctcataaaagtgatccgtcatgttatctcgtacaggccatgaacacggcatattcgtaccgtaaaaaatatcggaaatgccgccttgatggcggtgaaaataaaatcaccactccttcatcaccccgcattttacgcttcaaaataaataagaaaaggactttttatcgatcgtaaagaggggtattctgcaagcgttaaatagattgtatgaacctgtgcaattcgcgtcaggtgtattatggcaataatttaaatatagaatttttatgtatcttattgaattatataataattttattaaacataagctaatctaatgattgcttgtttatatatttgttttgtgattgattaagtgggtatttttaaggaatatctcaaaaattatcaaaatgataattcagaaaggataaatacaatatttattcatgattcagctttggccattttatggaggcaatacggactttgaacagttgggtatggttatccagatatatattattaagttattgctgaataagagatttaatgattttaaaaatagtttttacgacaaccgtaaattctagctcggtttgtatgtaaaaaatactgaaaatgatgcggttccgtgaagtgagctgcatctgcctgtctgggattaacggcaggtcattgtaagtagtaattaaccacgttaacaaggagtttacaaatgccaacaccgtgttatatctccatcactggtcagacccagggaaatattactgcaggtgcatttaccgctgattctgtcggcaacatctatgtgcaggggcacgaagacgagatgctggtgcaggaattcctgcataacgttactgtcccgaccgatcctcagtccggtcagcctgcgggtcagcgtgctcacaagcctttcatttttaccgtggcgctgaacaaagcggttccgctgatgtacaacgcactggcctccggcgaaatgctgccaaccactgaacttcactggtggcgtacctctgtggaaggcaaacaggagcattatttcactacccgcctgactgattcgacgattgtcgatatgaaactgcatatgccgcattgccaggacccggcgaaacgcgagttcacccagttgctcgaagtttcactggcctaccgcaaaattgaatgggaacacgtcaaatctggcacctccggtgccgacgactggcgcgcaccgctggaagcataagttaagccaacagcatccggctatcaggccggatgctgtttttgtattacgccgtagaaagaaaggttgtcagtaaggggttacgttcacgggagatggcggctgccggaaacttcggcggtagcgtgcctgaacgcaagcgtaacactgtactgtcacagccgctttaacagcgaactgtctgtttttccttaaccccggaggttgctatgtcaaccggattacgtttcacgctggaagtggacggcctgccaccggatgcttttgcggtggtttcctttcatctgaaccagtcactctcttcgcttttttccctcgatctctctctggtcagccagcagtttctctcccttgaattccagcagatcctcgacaaaatggcctacctgacgatatagcagggcgatgacgtacagcgccgggtgaaaggtgtggtgacctggtttgaactgggggagaacgacaaaaaccagaagctgtacagcatgaaggtatgcccgccgctgtggcgcacagggctgcgccagaacttccgtatcttccagaatgaggacatcgaaagcatcctcggcacgatattgcaggaaaacggggtgaccgagtggagcccgctgttcagcgagccacatccttcccgtgagttttgtgtccagtacggtgagactgattacgatttcctgtgccggatggcggcggaggaaggcatcttcttttatgaggagcacgcgcaaaaaagtaccgaccagagcctggtcctgtgcgataccgtgcgttatctgccggagtcctttgagatcccctggaatccgaacacccgtaccgaggtaagcaccctctgcatcagccagtttcgctacagcgcacaaatccgcccttcttccgtggtgaccaaagactacacctttaaacgacccggctgggcagggcgttttgatcaggaaggccagtaccaggattaccagcgcacacagtatgaagtgtatgactaccccggacgtttcaagggtgctcacgggcagaactttgcccgctggcagatggatggctggcgcaacaacgcagaagtggcgcgcggaacaagccgttctccggagatatggccgggacggcgaattgtgctgacggggcatccgcaggcgaacctgaaccgggaatggcaggtggtggcaagtgaactgcacggcgagcagccgcaggcggtgccgggacgcagtggttcaggaaccacgctgaataaccactttgcggtaataccggcagaccggacatggcggccacagccgttgctgaaaccgctggtggacggcccgcagagcgccgtcgtgacgggaccggcaggcgaggaaatcttctgtgatgaacatggccgcgtgcgggtgaaatttaactgggaccgttataacccgtcaaaccaggacagttcatgctggatccgtgtggcacaggcgtgggcaggcaccggattcggtaacctggcgataccgcgtgtgggtcaggaggtgattgtggacttcctcaacggcgatccggaccagccgatcattatggggcgcacctaccaccaggaaaaccgcacacccggcagcctgccgggaacaaagacgcagatgaccattcgttcgaaaacctataagggcagcgggtttaatgaactgaagtttgacgatgcgacagggaaagaacaggtctacatccacgcgcagaagaacatgaacaccgaggtgctgaataaccgcaccactgatgtgataaacaaccatgccgaaaaaataggtaacaaccaggcgatcaccgttaccaataaccagatccagaacattggcgttaatcagatacagacggttggtgtcaaccaggtggaaacggtgggtagtaaccagattatcaaagtgggatcaaaccaggttgaaaaggtggggatcattcgtgcgctgacggtgggtgtggcttaccagacgacggtaggcggcattatgaatacctcggtggcgttgttgcagtcctcacaggtagggctacataaatcactgatggtgggaatgggctacagcgtcaatgtggggaataacgtcaccttctcggtgggcaagacgatgaaggaaaacaccggacaaacagcagtttattctgccggtgagcatcttgaactctgctgtggtaaggcaaggctggtgctgacgaaggacggaagcatatttctcaacggtacgcacattcatctggaaggggagtcggatgtgaacggtgatgcgccagtgattaactggaactgtggtgccacacaacctgtaccggatgcgcctgtgccgaaagatttaccccccggaatgccggatatgcggcaattttgagtcaggtgcaaaaaattaaaacggaactggtgcagtgaccagatgaaccatattaaaagcagaaggaattgattcatgggcggcggaaaaccggcggcgcggcagggtgacatgacccgcaagggactggatattgtgcagggttcagcaggggtgctgataggtgcgccaaccggtgtggcctgctcggtgtgtcccacaaaaaaggacagtccgaactatggcagcccggtgaacccgctactcggtgcgaaggttctgcctgttgaaaccgacctggcactgcccggcccgctgccgtttattcttttccgcgcctacagcagctaccggaccaggacgcccgcgccagtgggcgtgtttggtcccggctggaaagcgcccttcgatatccgcttacaggttcatgagcgggaactgatactcaacgacagcggcggcaggagcattcactttgagtcgctgtttcccggcgagataagctacagccgcagcgagtcgttctggctggcaaggggcggagtgctgaaacaacacaaaggccatccgcttgcgcggctctggcgggcgttgccggaagcggtccgtctgagtccacacacctatatgatggctgtcagcacaaccgggcagtggctgatactcggctggccggagcgtgtgccggaggcggacgaggtgccgccgccggagccgcccgcataccgggtgctgacgggcgtggtggacggcttcgggcggacgctgactttccaccgggcggcggagggtgacgtggcgggcgcggtggacgggggggacggacggcgcgggccgctgttttcacctggtgctgagcacacaggcgcagcgggcagaagccttccgtaaacagcgcgagtcttccttatcttctccagccggtccccgttctgcttcctcttctcaggttttccccgacacgctgcccgccggtacagagtacggtgccgataacggtatccggctggaggcggtgtggctgacacacgacccggcatacccggatgaacagccgactgcgccgctggcgcgctacacgtacacggccagcggagaactgcgggcggtgtatgaccgcagcgggacgcaggttcgcgggtttacttatgatgcggagcacgccgggcggatggtggcgcaccattatgcggggaggccggagagccgctaccggtatgatgataccggtcgggtgacggagcaggtcaacccggaggggctggactaccgctttgagtacggagagagccgggtaatcatcacggacagcctgaaccggcgggaggtgctgtacacggaaggcgagggtggcctgaagcgggtggtgaagaaggagcatgccgacgggagcatcacccgcagcgagtatgatgaggcggggaggctgaaggcgcagacggatgcggcggggcggcggacggagtaccggctgcatatggcgtctggaaagctgacttcagtgatactgccggacggcaggacggtgcggtatggctataacagccagttgcaactgacttcagtgacatatccggatggtttacgcagcagccggaaatatgaccgtcagggccgactggcagaagagacctcgcgcaacggtaacattacgcgctggttttatgatttttcccgcagtggcctgccctgtgcggtggaagacggaaccggggtgaggcggagaataacgcgaaaccgttacggtcaactgctggcctttacggactgctcggggtacacgacgcggtatgagtacgaccagtacggtcaacaaatcgccgttcaccgggaagaaggcatcagcacttacagcagttataacccgcgtggccaactgatcagtcggaaggatgcgcaggggcgtgaaacccgttatgagtacagcgctgcaggcgacctgacagcaacgatatcaccggacggtaaacgcagcgccaccgaatatgataaacgtgggcgtccggtgagtgtgacggaaggtggactgacgcgcagcatggggtatgacgccgccgggcgcatcaccgtgctgactaacgagaacggcagccagtccacgttccggtatgacccggtggacaggctgacggagcagcgcggctttgacggccggacgcaacgttaccagtatgacctgaccggaaaactcacgcagagtgaagacgaggggcttatcaccctctggcattacgatgcgtcagaccgtatcacccggcgcacggtgaacggtgaaccggcggagcagtggcagtatgacgaccacggctggctgacagaaatcagccacctgagtgaaggccaccgtgtggcggtccactacggctatgacgataaaggccgcctgacgggcgaacggcagacggtggagaacccggagacgggggagatgctgtgggagcatgagacggggcatgcgtacagcgaacaggggctggcgacccgtcaggagccggacggtctgccgccggtggagtggctgacgtatggcagcggttatcttgcggggatgaagctgggcggaacgccgctggtcgagtacacgcgggacaggctgcaccgtgagacggcccgcagcttcggcggggcgggcagtacagcggggtacgaacaggccacggcgtacaccctcacagggcagctccggagcaggcacctgaacctcccgcagcttgaccgtgagtatacgtggaacgacaacgggcaactggtgcgcatcagcggcccgcaggagagccgggagtaccgttacagcgacacgggaaggctgacgggcgtccacaccacggcggcgaacctggatatcgatatcccgtatgcgacggacccggcaggaaaccggctgccggacccggaactgcacccggacagcacgctcacggcatggccggataaccgcatcgcggaagatgcgcactatgtctaccgccacgatgaatacggcaggctggcggagaagacggaccgcatcccggaaggggtgatacggatgcacgacgagcggacccaccactaccactacgacagccagcaccgcctggtgttctacacgcggatacagcacggcgaaccacaggtggagagccggtacctctatgacccgctgggccgccggacgggaaaacgggtatggcggcgggagcgtgacctgacggggtggatgtcgctgtcgcgtaaaccggaggtgacatggtacgggtgggacggtgacaggctgacgacgatacagaccggcaccacgcgtatccagacggtataccagccggggagcttcacgccgctcctgagaatcgaaacagagaatggcgaacaggcgaaggcgcggcaccggagcctggcggaggtgttgcaggaggacacgggggtgacgctaccggcggagctggcggtgatgctgggaaggctggagcgggagctgcgtgcgggagcggtgagtgcggagagtgaggcatggcttgcgcagtgcgggctgacggcggaacagatggccgcgcagatggaggatgcatacatcccggagcggaggctgcatctttaccactgtgaccaccgtggactgccgcaggcgctcatcaccccggaaggcgaaacggcgtggtgcggggagtatgacgagtgggggaaccagcttaatgaggagaacccgcatcacctgtaccagccgtaccgtttgccggggcagcagtatgatgaggagtcgggactgtattacaaccgtcaccggtactacgatccgttgcaggggcggtatatcacccaggatccgatagggttgaaggggggaataaatctatacacgtatccactggtaccaatacgttacactgatccactggggttagaacgagttataagtgtatatgggcctcccgctccagaccgggcaggtgctgaaactcctcttgttcttactgatatgactggaggagtgactatttattatgatcctgaaacaggtgattcaatgacttttgatagtagcaatagaattgatcgtcgttctcaacgtggtgctggtgatccatatacaggtgaagtcgttggttgtgagacaaatgaatcaggaatatcggcagcatatggcacaacgaagatctatactacagatactagagcaagatggctacatggtgggggatcatcgttgcgcgatccttatgctcctcgacaaggctggaaaccaactatgggatgtacccgtgcacagaatgaagatgtagatgagttgtgtaagaaagtgacaagttggatgtattcgcatcctggagagagaattagatatgaacgttttaagacacgttaatgcgattaacatgggagtgtgcattctaatttgggttattggatgtgcaaatgctaaagttcttaaacgatgtatattacccgctcctgatggtggcgtagaaaaactatcaaaacccaacttacatggagtaattaaaaaagttgatttgaacacaaatgaagcggaaattaaaataaaagaggggggggcagtgagttttatttttaatgaggaaacattgtattttactgtttttggtggggattttattatggatgatttaaaaaaagtaaaaaatacggaagcatgggtatggtataaaaattgcgatagtaaaaataaaaatgtggcagttgaacttcttcaaatctacgaattgcatcaatgaaaaatatagttaaatagaggaggttattaatagcaggaaaagcatcacgtgatgctgattttttgcactaaataattcgcgctaatgttcaatagttaatatatccctcatcagggaaagatcaccggtgtgccgtaggcacaaagatgcaaaacgggacgttttgcatgtaataagcataagcttgtgaagagatggtggcaggcccaccgggatctgctgtcggaagtcggtcccaaacaaccccggctgctgtggtaaagagccatggtagtgagcgcaggggcagggaaagatcacgtaacgctgattttttgtactaaataattcgcattttatgtttaaaaattgagatattcctcattacctgaagctgttttttattgcttatacatgatcaaatactccttacataattaaggagaacaaaatggaacttaaaaaattgatggaacatatttctattatccccgattacagacaagcctggaaagtggaacataaattgtcagatattctactgttgactatttgtgccgttatttctggtgcagaaggctgggaagatatagaggattttggggaaacacatctcgattttttaaaacaatatggtgattttgaaaatggtattcctgttcacgataccatcgccagagttgtatcctgtatcagtccttcaaaatttcacgagtgctttattaactggatgcgagattgccatacttcagatgataaagacgtcatcgcaattgatggaaaaacactccggcattcttatgacaagagtcgccgcaagggagcgattcatgtcattagtgcgttctcaacaatgcacagtctggtcatcggacagatcaggacggatgagaaatccaatgagattacagctatccctaaacttcttaacatgctggatattaaaggaaaaatcatcacaactgatgcgatgggttgccagaaagatattgcagagaagatacaaaaacagggaggtgattatttattcgcggtaaaaggaaaccaggggcggctaaataaagccttcgaggaaaaatttccgctgaaagaattaaataatccagagcatgacagttacgcaattagtgaaaagagtcacggcagagaagaaatccgtcttcacattgtttgcgatgtccctgatgaacttattgatttcacatttgaatggaaagggctgaagaaattatgcgtggcagtctcctttcggtcaataatagcagaacaaaagaaagagccagaaatgacggtcagatattatatcagttctgctgatttaaccgcagagaagttcgccacagcaatccgaaaccactggcacgtggagaataagctgcacaggcgtctggacgtggtaatgaatgaagacgactacaaaataagaagaggaaacgcagcagaattattttcagggatacggcacattgctattaatattttgacgaatgagaaggtattcaaggcagggttaagacgtaagatgcgaaaagcagccatggacagaaactacctggcgtcagtccttgcggggagcgggctttcgtagtaataccccgactctccccgtccttaaacacaacccccactcaccacaacctaaactcatccgcatcctgccatgccggaaacttttctctatattcccgcaatgctgccatcgacagctccgcatcaatgcgcgttgcctgatgcgcgtcggcagtagcgataatctctccttgcggattaatcacccggctgtcaccgcgataatggcagccgttgccatcgctgccgacgcgattgcatcccgccacatacgcctgattctcaatcgcgcgggccgtcagcaatgcctgccagtgcagagagcgcggagcaggccagttggcgacgtacagggcgaggtcataatcgttgagattgcgcgaccacacaggaaaacgtaagtcgtagcacaccagcggcaaaatacgccagccgcgccattccacaatcactcgcgcattgcccgctttataatgtagatgctcatctgccatgcggaacagatgacgcttatcataaaaatgtaccgtgccgcccggctcaaccagcaaaaagcggttaaccgaaccagactccgtttgtaatgcaacactgcctgcaatcagcgcattgcactgctgcgccttagctgtcatccagttcactacgtcatcttgtgctagcgacgaagctgccgcttccatggcaaagccgctggtaaacatctccggtagaacgatcacatcgcgcccggtaataccttccagttgacgatcaaaatgacgcaggttggcaggaccatccatccacaccagtggttgctgcaaaagcgtaatcttcaaaccaggcacggtgtacaactcctttatgcgaagggttttataactttaacaccttatcaggcagttgccttagcgcagaataaattgataacaaatgctgatattggaaatatctgatttgcaaattatcgtgttatcgccaggctttaggaggttaataacatgggcaggataagctcgggaggaatgatgtttaaggcaataacgacagtcgccgctctggtcatcgccaccagtgcaatggcgcaggatgatttaaccattagcagccttgcaaagggcgaaaccaccaaagctgcatttaatcagatggtacaagggcataagctgcctgcctgggtgatgaaaggcggtacttatactcccgcacaaaccgtaacgttgggagatgagacgtatcaggtgatgagcgcgtgcaaaccgcatgactgtggctcgcaacgtatcgctgtgatgtggtccgagaaatctaatcagatgacggggctgttctcgactattgatgagaaaacgtcgcaagagaaactcacctggctgaatgtgaacgatgcgctttcgattgatggtaaaacggtgttgttcgcggcgttgaccggcagcctggaaaaccatccggatggctttaattttaaataattagcggataaagaaacggagcctttcggctccgttattcatttacgcggcttcaactttccgcactttctccggcaactttaccggcttcgtcgccagctcttccggatcaaagtcatcaacgttaatactgcgcagacggctttcttcagctttcaccagaatagcggcttcatctttatcaatcagccccttcaccagcgcgttgtgcgccagttcatccagacgggtaaacggcaggtttttacccagctctttacagatccgctgatgaattgggtcggcggcaatcacatccaccagcgcctcttccagcaagccaaccggattatgctcgctcggcgtcaggtactgaccgcgaccaatgcgggaacgggtggcgttcggcacttgtaaaatcttcgccactttatgatccagcttgtcagaaggtgccagataatgacgtccggtcgggaagatcaccacattcagcagcccggcaaccacgcggttcgggaagttttgcagtaaatcatccatcgcctgttcagcctgatacagcgcatcttgtacgccccagtgcaccagcggcaggtcggcttcattacggccttcgtcgtcataacgcttcagcacggcagaggcgaggtagagctggcttaaaatatcccccagacgggccgagatgcgctcgcgacgtttcaggctgccgcccagcactgccatcgagacatcagaaagcagggcgaggttggcgctcaggcggttcaggtgctgatagtagcgtttagtggcatcgccggttggcgtgctgctggttaaaccgcgcgtcaggcccagccagaagctgcgaactttgttgctaccgacgtgaccgatatgtttgaacaacagtttatcgaacgcgttgacgtcattgttcttcgccgcttccatctcttccagcacgtacggatggcaacgaatcgctccttgtccgaagatcatcatgctgcgggtcagaatgttagccccttcaacggtgatggcaatcggtgcgccctggtaagcacgcgccaggaagttgctttgcccgagcataatgcctttaccgccggtaatatccatcgcatcaataatcgactgctgcccgcggtgggtacagtgatacttaacgatagccgacagcacggcaggtttttcgccgagcataatgccgtaggtaatcagcgatgccgcagcatccatcacgtaggcattaccggcaatacgcgccagcggctcttcaatcccttccatcttaccaatagagattttgaactgacggcgaatgtgagcatacgcgccggttgccagcgctaccgatttcacgccgccggttgagttggaaggcagggtgatgccgcggcctaccgagaggcactccaccagcatccgccagccttgcccggccattttcggcccgccgatgatgtaatcgatcggcacgaagacatctttaccgcgcgtcggtccgttctggaacggtacgttcagcgggaagtggcgacgaccaatttccacgcccggcgtggtggttgggatcagcgcacaggtaatgcctaaatcttctgcaccgccgagtaatttttccgggtcggagagtttaaacgccagcccaagcacggtcgcaatcggtgccagcgtaatgtagcgtttgttccaggtcagacgcatccccagcacctgctggccctgccattcgcccatgcagacaatcccggtgtccggaatcgcgcccgcatcggaacccgcttccgggctggtcagtgcaaagcaggggatctcctgaccacgcgccagacgcggcagatagtgatctttctgctcgtcagtgccgtaatgttgcaacagttcgcccgggcctaatgagtttggcacgccgacggtaatcgccaggatcccgctcacgccggagagtttttgcagcacgcgagactgggcataagccgagaactccagcccgccgtactcttttttgatgatcatcgcgaagaaacgatgctctttaaggtacgcccacaactccggcggcagatccgccagctcatgggtgatctggaaatcattcgccatccggcaggcttcttctaccgggccgtcgagaaacgcttgctcttcggcggtcaggcgcggctgcggatagttatgcagctttttccagtccggcttgccctggaacaagtcgccctcccaccaggtggtgcccgcatcaatcgcttctttctcagtgcgcgacatcggcggcatcaccttacggaaaccgcgaaataccggcgcggaaatcatcgacttacgcataggcgcaaagttaaatggcacgaggataatggccagaggcaccagtacccacgccgaccacagaccagcaacgccgagggcggctgtccaggcgagcaaaatcagactgctgataaataagctcacgcggtgatagaacaacgcgccgagcaggacaaccgtagcgagaatactcaaaatcatcataacgaaaagccccttacttgtaggaggtctgaccacttgtgatgatatggttgtagtggatgtaaaaacatttagcaatatgtttacaatataattacaacaaagctcacattgttgctgtttttatccgcacttcaggtcaaaaagtcctggtcatagcacctgcccgtacttctcgcttttggcggtatccggtacactgcattttgtctattacatttatgctgaaggatatcctcatgtaccaggatcttattcgtaacgaactgaacgaagcggcggaaacgctggctaactttttaaaagatgacgccaatattcacgccattcagcgcgcggcggtcctgttagcagacagctttaaagccggtggcaaagtgctttcctgcggcaacggcggttcccattgcgacgctatgcactttgccgaagagttgaccggtcgctaccgtgaaaaccgtccgggctacccggcgattgctatttctgacgttagtcatatttcctgcgtcggtaatgatttcggtttcaatgatattttctcccgctacgttgaagcggtaggtcgcgaaggcgatgtactgctggggatctccacctccggtaactctgcaaacgtgatcaaagcgatcgcagcggcgcgtgagaagggaatgaaagtgatcaccctgaccggtaaagacggcggcaaaatggctggcacggcggatatcgaaattcgcgtaccgcactttggttatgccgaccgcattcaggagattcacattaaagtgatccatatcctgatccagttgattgaaaaagagatggttaagtaagtctggcgtaggccggataagacgtttacgccgcatccggcatttgtgcgctgatgcctgatgcgacgctgacgcgtcttatcatgcctacaaatctgtacgcgaaccgtaggccgaataatgcgttcacgccgcatccgacctgaaaattcttaaatcaatcttcgccgggggccatgcgctcccgctgttgtggaggttacccatgtgcgaattgctcgggatgagcgccaacgtccctaccgatatctgctttagtttcaccgggcttgtacagcgtggtggtggaaccgggccacataaagatggctggggcattaccttttacgaaggtaaaggctgtcgcacatttaaagatccacaacccagctttaattcccccatcgccaaacttgtccaggactacccgataaaatcctgttcggtggtggctcatattcgccaggctaatcggggcgaggtggcgctggaaaatactcacccgtttacccgcgagttatgggggcgtaactggacttatgcccataacgggcaactgacgggctacaaatcactggaaaccggcaacttccgcccggtcggtgaaaccgacagcgaaaaagccttttgctggctcctgcataaattaacgcagcgttacccgcgcacgccgggcaacatggcggcagtgtttaaatatatcgcctcactggcggatgaactgcgggcgaagggcgttttcaacatgctgctttcggacggtcgctatgtaatggcgtattgctcgactaatttacactggatcacccgccgcgcgccgtttggcgtggcaacgttgctggatcaggatgtggaaatcgacttcagctcgcagaccacaccgaatgatgtggtcacggtgattgcaacacagccgctgacgggcaatgaaacctggcaaaagattatgccaggcgaatggcgcttattttgcctcggggagcgtgtagtttgatgccagttgtggctgcacaacttcgtggcttaacggcttgctgaccacgtaacgaccattgaccacagaaacggttggtggcttacgggtttgctcaaagtagtcgtaacccggcttcagctgctcccagaagtccttaaagttggaatatttatggcgcttcatattggcgtcggtcatgcggaacgggtaaatactcacttgcacgctcggctgaccaaacaccagcgcaccagtaacgaactggaatatctcatcaataccctgattggtcattgcgtagcagccgatggaaacacaatcgccgtggatcatcaggtatttcccttcataaccatgcgcacggtcataggcattggggaaaccaatattaatcgctttgtagtaacggctgtctggttttaactgattacgctggacgctataaaacccttccgggcttttgaaatcgccctgacgctgttttggccctaagccgccggaatatttacagattttatagctgtcgagcagttgatattgctcgcccattttgacgtagagatcgagcgtacgttcttccttgaagatctggatgtagacaggggatcccatcaactgctgcttatactctttgctcactggcgtggtcgagctactgctgcccagcaaaccggcaaacgaaacgcacgggatcaacaacatcgcaagaattaatgcgattttacgcatactgcttattccttgataaaacggttacacacgccaggacggcaaaatagatcccaaatcggaatagtctggatttggaaggctcacattatcaccaaaagagttttacgcaagcctgtcggcgcagggtttacaaatttcatcggcagcgtgctttacccaaagagcgccgcgtgagttccagttctctcaaatcgtaaaagtttatcggtaagtttgtaaatcaggatccagtccggttcgacatgagcatcgcgataacctttccatgaaccttgcagcgggtggtctttataaacagctggaagcggtaaagcattattgataagaagcgtcataagatatttcaatttattcatatccttatgacgcttttgtgcaagttttacatcctttgaaaattgtcccgagtattcaatatccctttgaatcatatttaaattcctaatttatcaaataaatcatcggcgtctttggccttatgaacatcaacgccagcttcgctgtttttgattgattgaatggttaattgattaggctcgcgtaaatcaaacggcaatgccttttcacgcgcgacctttgtgagggttatgcgaaccaggtcagagatggtcagccccatcccggccagtacgtccgccgcctgattcttcagatcttcatcgattcgggcgcgaacaaacgcgttagcagccattgggggatctcctgtgctgtatatttattcagcttgaattgtagctcaaatgagcaacagcgacaatccatgagtaatttaataaacggatgtttttacataattaactgaaatatatttattaattttataataatggtttattaagtttgttcaggtacgggccgggatacactgtaacatcaatgcatgaccagccattattgagaatgtctttgccgtcgattccctcttttgtgttgtcgggattactgttgctttgcttgccgttttcttcatttgcctgcgccaccacatcacatatctctttcagctacgccgcccgccagcggatgcaaaaccgtgcgcgtttattaaaacagtaccaaacccatctgaaaaaacaggccagctacattgtggaaggcaatgcccaaagcagaagggcgctgcgccagcacaaccgggagcagataaaacagcatccagaatggtttcctgcgccgctcaaggcgagtgacagacgctggcaggcgctggcggagaacaatcactttttaagcagcgaccatctgcataacatcaccgaagtggcgattcaccgtctggagcaacagcttggcaagccttacgtctggggcggcacgcggcccgatcaaggcttcgactgtagcgggttggttttttatgcctacaacaagatccttgaggcgaagctcccgcgcacggccaatgagatgtatcactatcatcgggcaacgattgtggcgaataacgacctgcgccggggagatttgctgtttttccatatccacagccgcgagatagccgatcatatgggcgtgtatttgggcgatgggcaatttatcgagtcgccacgtaccggcgaaaccattcggataagccgattagccgaacctttctggcaggaccattttttgggcgcgcgcaggattttgacggaagagacgattttgtaggccggataaggcgtttacgccgcatccggcggttgtgcgcagatgcctgatgcgacgctgacgcgtcttatcatgcctacaaatctgtgcgtttttgcgagccgctttcctgttattccatcacctcattgccgacctttccttttcttcttaccgttgagaaaaaggagtcgccatgtctgaatatcgtcgttattacatcaaggggggaacctggtttttcacggtgaatttacgcaatcgtcgaagccaactcttgaccacccagtaccagatgctccgtcacgccattattaaagttaagcgagacaggccttttgaaatcaacgcctgggtcgttttgccagagcatatgcactgtatctggacattacctgaaggcgatgatgatttttcctcgcgctggcgggaaattaaaaagcaatttacccatgcttgtggattgaaaaatatctggcaaccacgtttttgggagcacgccatccgcaataccaaagattataggcatcatgttgattatatttatataaatccagtaaagcatggttgggtaaagcaagtgagtgattggccattctcaacgttccatcgcgatgtcgcgcgagggttatatcccatcgattgggcgggggacgtaacggattttagtgccggggagcgtatcatttcataattgtgcgcagatgcctgatgcgacgctagcgcgtcttatcatgcctacaaacttgtgccggatcggtaggccggataaggcgtttatgccgcatccggcagttatgcgcagatgcctgatgcgacgctggcgcgtcttatcatgcctacaaacttgtgcctgaacggtaggacggataaggcgttcacgccgcatccggcagttgtgcaccaatgctggatacttacatcaacgcccccataatcttcaactccagctcatccggcacttcgttatacgacagcacatgcagccccggcgcaaacaaccttgcataacgcgccagcaaagggcgcagctgcggtggcaccagcagcaccgggtctttccccgccgctttcatctgctctttcacctgtggcatcgtgctctggaactggttgagcatattcgggtccaccggcacgctgtcgagcatcactttcccgccctgttgcgcctgattcaccacgttggtcagcagattttccagctcattattcagcgtatacaccgtcagctcctgcttgcgaacgaacggatgggtaatgcttcgccgcagcgccaggcgcacatcagctgccagcagaatatgatctttggtcaccgcgctactggcgaccagcacggtggcgatggtgacgatatcgcgcagggaaacgccttcggtcagcagcgcccggtacactttcagcaactggctgtaattgagcgccgcgcttaaatcttccgccaggcgcggtgccatcgacgccaaacggttatgcaactgcgtaatatcatcatagttaaacaaatcaggaatatagctgcgcacaatcttgttcacatgggtagcaatcacgctggcgctgtcgatcacctgataccccatattcagcgccttcgccttctgcgcaggctggatccaggtgaccggcatcccatacgccgggtcgttccccagcacgccgtcaatctcgccgtaggtttcgctggagggcagggccatcagtttatccgccggaatatccgcttcatcagccttaatgccgttgatgaaaatagcgtactggctgggcttaaggcggaagttttcccgaatgcggatctccggcagcagcacgccgttgccgtcagaaatcacctgtcgcacgccgcgaatacgctgggtgagcgggttgccctgggctttgtccaccagcgccaccagcttgtagccgaggcttaagctgatgggctcgatcagcggaatggtttcccaactgacctgttgctcgctggtttcggtgatggtgcgggtcagcgtttcgagacttttctcttccgcttccgccgcctgcgggcgtttgctcatccgccagccggtaaagccaagcagggcgctgaacagcaaaaacggcagatgcggcattcccggcaccaccgccagcacaaacataatcccggtagcggtgtagagcaccgacgggcttgccagcagctggtggcgcacgtcatgggcgatatcgccgttgtcgctgacgcgggtgacgataatcgccgccgccgtggagagcagcagggaagggatctgcgccaccaggccgtcgccgatggtcatcagcacatactgctggaaggcagcatcggcgctcaggttgtatttgaagatcccgatacagacgccgccgatcaggttgatcgccagaatcatcatcccggcgatggcgtccccgcgcacaaacttcgatgccccgtccatcgcgccgtagaaatcggcctcgctggcaacatctttacgccgggtttgcgcctgcgcctggttgatcaatccggcgttaagatcggcgtcaatcgccatctgtttgccgggcatcgcgtctaaggtaaagcgggcagaaacctcggaaatacgctcggcccctttggtgacgacaataaagttgattgtcaacagcgtcagtaaatccgagcgtgaaagcattatcgccgcgctgcacgggcagtcgattttcagtggcggcggattgtcgccgttaaataaaatcagcccgtctcatccgccaaaacctgccaccgtggcggtgccggaagagacggagaaaaaagcgcgagacgtcaacgagaaaacagcgctgctgaagaagaaatccgccaccgagcttggcgagctggcaaccagtatcaacaccattgcccgtgatgcgcatatggaagcgaatctggagatggagattgttccccagggattgcgcgtgctgattaaagatgaccagaaccgcaatatgtttgaacgcggcagcgcgaagattatgccgttctttaaaacgctgctggtggagctcgcgccagtgttcgactcgctcgataataaaattattattaccgggcataccgatgcgatggcctacaaaaacaatatctacaacaactggaacctttcgggtgaccgcgcgctttcggctcgtcgggtgctggaagaggccggaatgccggaagataaagtgatgcaggtaagcgcaatggcggaccagatgctgctggacgcgaagaatccgcaaagtgcgggtaatcggcgcatcgagattatggtgctgaccaaaagtgcgtccgatacgctgtatcaatactttggtcagcatggggataaagtggtgcagccgctggtgcaaaagctggataagcagcaggtgctttcgcagcgaacgcgctaaatgctgaatctttacgcatttctcaaaccctgaaatcactgtatactttaccagtgttgagaggtgagtaatgcgtaaaatcattcatgtggatatggactgctttttcgccgcagtggagatgcgcgacaatcccgccctgcgcgatatccctattgctattggcggcagccgcgaacgtcggggggtgatcagcaccgccaattatcccgcgcgtaaatttggcgtacgtagcgctatgccgacagggatggcgctcaaattatgcccgcatctcaccttgcttccggggcgctttgacgcctacaaagaagcctcaaatcatatccgcgaaatcttctcgcgctacacctcgcgtattgaaccgttgtcactggatgaggcttatctcgacgtcaccgatagcgtccattgccacggttctgcgaccctcatcgcccaggaaatccgccagacgattttcaacgagctgcaactgacggcgtctgcgggcgtggcacccgtaaagtttctcgccaaaatcgcctccgacatgaataaacccaacggccagtttgtgattacgccggcagaagttccggcatttttacaaaccttaccactggcaaaaatccccggcgtcggcaaagtctcggcggcaaaactggaagcgatggggctacgaacctgcggtgatgtacaaaagtgtgatctggtgatgctgcttaaacgctttggcaaatttggccgcattttgtgggagcgtagtcaggggattgacgagcgcgacgttaacagcgaacggttgcgaaaatccgtcggcgtggaacgcacgatggcggaagatatccaccactggtctgaatgtgaagcgattatcgagcggctgtatccggaacttgaacgccgtctggcaaaggtaaaacctgatttactgattgcccgccagggggtgaaattaaagttcgacgattttcagcaaaccactcaggagcacgtctggccgcggctgaataaagctgacttaatcgccaccgcgcgtaaaacctgggatgaacgccgcggcgggcgcggtgtgcgactggtggggctgcatgtgacgttgcttgatccgcaaatggaaagacaactggtgctgggattatgatgtatactattatgtctattctggtgtgcattattatgaggggatcactgcatgcatcgaattctcgctgaaaaatcggtcaatattactgagttacgtaaaaacccagctaaatactttattgatcaaccggttgcggttctttctaataatcgccccgcaggatatctcttaagtgccagcgcattcgaagcgttaatggacatgcttgctgaacaagaggagaaaaagcccataaaggcgcgcttccgtccaagtgctgcaagattagaggaaattacacgccgagctgaaaaatatcttaatgatatgacggatgatgatttcaatgactttaaggaataaggatgcgggtattcaaaacaaaacttattcgcctgcaacttacagcagaggaacttgatgcgttaacggcggattttatttcctataagcgtgacggtgttttgccagatatatttggtcgcgatgcactctacgacgactcgtttacctggccattaatcaaatttgagcgagttgctcatattcatctggcaaatgtgaataatccatttccgccacagttgcgccaattcagcagaacgaatgacgaagcgcatttgctatattgtcagggtgcgtttgatgagcaagcatggttgctcattgccattctgaaacctgaacctcataaacaggctcgagataacaaccaaatgcataaaattgggaaaatggcagaagcgtttcgcatgcgtttttgaatttatattatgaataacatacaaataagagactatcagcctggcgattttcagcaactatgcgctattttcattagagcggttacgatgatctccagtcagcattattcaccacaacaaattgccgcctgggcgcagattgacgaatctcgctggaaggagaaactcgcgaaatcacaagtgcgggttgccgtcattaatgcacaaccggttggttttattacctgcgttgaacgttatatcgatatgttatttgttgaccctgaatacacccgccgcggggttgcctgcgctttgttaaaacctttgattaagtctgaatccgaacttacggtggacgccagcataaccgcaaaacccttttttgaacgttatggttttcagacagttaagcagcagcgcgttgaatgccggggaacgtggtttactaatttttatatgcgatataaaccgcaatattaaatccagcttgcaatgaaaataacgcccgcctggtatgtgcgcgttttcttattccacaaactgcaaggaggtaaatcatgacaaatcctttatcaatgactctttgcagacctttccaggattaattctttttttcttgccctggattcgtctgccatttcctgatttttatatttatatactctaaataattcgagtcgcagtacatgcaacttgaagtatgacgagtataaatggaatggtacatgggcaaatatattcgtcccttatccgatgcggtatttaccatcgcatctgatgacctgtggatcgagagtttagcgatccaacaattacacaccacggcaaatttacccaacatgcagcgcgtagtggggatgccagatttacaccccggacgcggctacccgattggcgcagcgttcttctctgttggtcgtttttacccgacaagacgtcgctgtaacggtgctggaaacagaaacgggccgctactctgacacgctgcgttcggcgctggtttctctggatggcgataacgcatgggcattaagcgaaagctggtgtggcactattcagtggatttgtccgagtccgtatcggcctcatcatgggcgcaaaaactggtttctgggcattgggcgttttaccgctgatgagaaggaacaatcggatgcaatccgttatgagacgctgcgttcgtcggggccgggcggtcaacatgtcaataaaaccgactcggcggtacgcgccacgcatctggcatccggtattagcgtgaaggttcagtcagagcgcagccagcatgctaacaaacggctggcgcgattgctgattgcctggaagctggagcagcagcaacaggaaaatagcgcggcgctgaaatcgcagcggcgaatgttccatcaccagattgaacgtggcaacccgcgacggacatttacagggatggcttttatcgaaggataatgaaggatgaaactgccggaaggcgattaaacgccatccggcagcaaatcaaataattacttcgccggaatttctttcagcagttcagtcagcagtgtccagtaatgacctacgcttttgatgtgaacttgctcatccggagagtgtggaccggtgatagttggcccgatagaaaccatgtccatttccggatacggttttttaaacagaccacattccaggcccgcgtggataatctggatgttcggcgtcttgttgaacaggcgctgataggtttcacgtaccagatgcatcaccggagaattagcgtccggctgccagccaggatatgcgcctttcgcttcggttttcgcgccagccagtttacccagcgaatccagcatgctcaccacgtagtctttaccgctgtcgatcagtgaacggatcaggcagtgaatttctacgttattgtcagtcatggtcaccacaccgacgttcagggaggtttcgaccacaccttttgccacgtcggaattgcggatcacaccgttcggggtggcgttcagcagacgaataaaggtatcgcgagatttcgcaatcagagcagctttatcgttcgctacagagtccagcaacaaggccagattcttctctttctctgccagctcgtttttcaggatgtcctgataggtattcaccagagatttcagggcgtcgactttatcagctgcgacagcaatggtcgcaaaggcttcacgcgggatggcgttacgcagtgtgccaccgttgaaatcgataaggcgcaggtccagctcttccgcatgacccgccaggaagcgcaccagcagtttgttggcattacccaggccaacgtggatttcaccgccggagtgaccgccttttagaccttttaaggttaacttgaaggtttcaaagccagctggaaccgcttcacgatccaaatgcaggttggaggtgaagtcgataccccccgcgcaacccatgtagatttcaccttcttcttcggagtcggtgttaatcagaatatcagcctgcaaccagttgctctgtaagccgaacgcaccgtccataccggcttcttcggtcatggtcagcagcacttccagcgggccgtgaaccacgttttcgtcagccagaaccgccagcgcagacgccataccaatgccgttatctgcacccagcgtggtgccgcgcgctttaacccattcgccatcaatataaggctggataggatctttcgtgaagtcatgcacggtgtcgttatttttctgcggcaccatatcgaggtgggcctgcaagacgaccggtttacgattttccatacctgcggtggcaggtttacgaatcaggatattacctacctgatcgcgttcgacatggaaacctttctcttttgcccaaccaacaatgtattcagcgagttgctcttcatgataggacgggtgaggaatagaacagattttggcaaaaatatcccacagcggctgtggagataattgagacagttcagacacgttaagtctccttgtcgatcacccgcaaaacagtattgcaggtcacagggttagcagaaaatgttgtcaacacaagacaggcttgcgagatatgtttgagaataccactttatcccgcgtcagggagaggcagtgcgtaaaaagacgcggactcatgtgaaatactggtttttagtgcgccagatctctataatctcgcgcaacctattttcccctcgaacactttttaagccgtagataaacaggctgggacacttcacatgagcgaaaaatacatcgtcacctgggacatgttgcagatccatgcacgtaaactcgcaagccgactgatgccttctgaacaatggaaaggcattattgccgtaagccgtggcggtctggtaccgggtgcgttactggcgcgtgaactgggtattcgtcatgtcgataccgtttgtatttccagctacgatcacgacaaccagcgcgagcttaaagtgctgaaacgcgcagaaggcgatggcgaaggcttcatcgttattgatgacctggtggataccggtggtactgcggttgcgattcgtgaaatgtatccaaaagcgcactttgtcaccatcttcgcaaaaccggctggtcgtccgctggttgatgactatgttgttgatatcccgcaagatacctggattgaacagccgtgggatatgggcgtcgtattcgtcccgccaatctccggtcgctaatcttttcaacgcctggcactgccgggcgttgttctttttaacttcaggcgggttacaatagtttccagtaagtattctggaggctgcatccatgacacaggcaaacctgagcgaaaccctgttcaaaccccgctttaaacatcctgaaacctcgacgctagtccgccgctttaatcacggcgcacaaccgcctgtgcagtcggctcttgatggtaaaaccatccctcactggtatcgcatgattaaccgtctgatgtggatctggcgcggtattgacccacgtgaaatcctcgacgtccaggcacgtattgtgatgagcgatgctgaacgtaccgacgatgatttatacgatactgtgattggctaccgtggtggcaactggatttatgagtgggccacccaggcgatggtgtggcaacaaaaagcctgtgcggaagaagatccgcaactcagtggtcgtcactggctgcatgcggctacgttgtataacattgctgcctatcctcatctgaaaggagatgacctggccgagcaagcgcaggctttgtcaaaccgcgcctatgaagaggccgctcagcgtctgccgggcacgatgcggcagatggagtttaccgtacccggcggtgcgcccatcaccggctttttgcatatgccgaaaggcgatggcccgttcccgacagtattaatgtgtggtggtctggatgcgatgcagacggactattacagcctgtacgaacgttattttgcgccgcgcggcattgcgatgctgactattgatatgccgtcggtgggcttttcttcaaaatggaagctgacccaggactccagcctgttgcatcagcacgtcttaaaggcgctgcctaacgtaccgtgggtggatcacactcgcgtcgcggcctttggtttccgtttcggcgctaacgttgccgtgcgtctggcataccttgaatcgccgcgtctgaaagcggttgcctgtcttggtccggtagttcataccctgttgagtgattttaagtgccagcaacaggtgccggaaatgtatcttgacgttctggcgagtcgtttggggatgcatgatgcttccgacgaagcgttgcgcgtggagctgaatcgctattcattaaaagtgcaaggattgctgggacgtcgctgcccaacgccaatgttatcgggctactggaagaacgatccgttcagcccggaagaggactcacgcttaatcacctcatcatctgctgacggtaaattattagagatcccatttaacccggtgtatcggaattttgacaaaggtcttcaggaaatcacagactggatcgaaaaacgtttgtgttaaaaatttgctaaaatttgccaatttggtaaaacagttgcatcacaacaggagattgcaatgacgttaccgagtggacacccgaagagcagattgatcaaaaaatttaccgcactaggcccgtatattcgtgaaggtaagtgcgaagataatcgattctttttcgattgtctggctgtatgcgtcaacgtgaaaccggcaccggaagtgcgtgagttctggggctggtggatggagcttgaagcgcaggaatcccgttttacctacagttaccagtttggtctgttcgataaagcaggcgactggaagagtgttccggtaaaagacactgaagtggttgaacgactggagcacaccctacgtgagtttcacgagaagctgcgtgaactgctgacgacgctgaatctgaagctggaaccggcggatgattttcgtgatgaaccggtgaagttaacggcgtgagtgaaatgtgccggatgtatcacatccggcaatatccattaaaactgataggtcatgccaaccgcgacaatatcatcattattaatattcaatttgttatcgctatccagttggttgattttataatcaacaaacgctgacatatttttgttgaaataatacgtagcaccgacgtcgatataattgaccagatcttcatcaccgataccttcaatatctttccctttcgataagacataacccagcgatggacgcagaccaaagtcaaactggtattgagcgaccgcttcaaagttctgtgtcttattggcaaagccgccagttattggcgtcattttgcgtgtttcagaatagaaagttgccagataaatattattggcatcgtatttcagacctgttgcccatgcttctgcacgcttgcctgtgccacggctttgcaggttctgctcgttggtgcgatctgagttggtataggccccactaatggcgaaatcgctgccgccaaagtcatatgtcaatgacgtaccgaagccatcgccgttttgctttttaacgtcgcggttttcgtttttcccttgatattgcagggttaagttcaggccatcgataacgccgaagaagtcggtgttccgatacgtcgccagaccgctggcgcgtttggtcataaagttgtcggtctgcgccgaggaatcgccaccaaattccgggaacatatcggtccaggcttccacgtcatacaacgcccccaggttacgaccataatcgaaagaacccaaatctttatatttcaacccggcaaaagcgagacgcgttttttgctgtgcagtatcactctctgctttattaccggcaaactctgcttcccaacgaccataaccagtcagttgatcgttaatttgtgtttcgcctttaaaaccaaaacggatataactctggtcgccatctttactggcgttatcactcatataatgcatggctttaactttgccatagacatccagtttattaccgtctttattatatatttctgcagcctgtacagatgcagatgccacaatgcccatcaccactaatgccagagtgctctttttcattttcattcctgattttaattaacgcgcgaatattcagcgggagagtcccgttgaaaacaggaaagtttttaacctgagattgttaaagatatattacagattaataatattcttaaaatgtggtaatttattaaatctgtaataaaagcgtaaacaactgccgctaggcttgctgatcccgcgcaacaaaacgccatgctttgctcgcagatggttggcaaccgacgacagtcctgctaaaacgttcgtttgatatcatttttcctaaaattgaatggcagagaatcatgagtgacagccagacgctggtggtaaaactcggcaccagtgtgctaacaggcggatcgcgccgtctgaaccgtgcccatatcgttgaacttgttcgccagtgcgcgcagttacatgccgccgggcatcggattgttattgtgacgtcgggcgcgatcgccgccggacgtgagcacctgggttacccggaactgccagcgaccatcgcctcgaaacaactgctggcggcggtagggcagagtcgactgattcaactgtgggaacagctgttttcgatttatggcattcacgtcgggcaaatgctgctgacccgtgctgatatggaagaccgtgaacgcttcctgaacgcccgcgacaccctgcgagcgttgctcgataacaatatcgttccggtaatcaatgagaacgatgctgtcgctacggcagagattaaggtcggcgataacgataacctttctgcgctggcggcgattcttgcgggtgccgataaactgttgctgctgaccgatcaaaaaggtttgtataccgctgacccgcgcagcaatccgcaggcagaactgattaaagatgtttacggcattgatgacgcactgcgcgcgattgccggtgacagcgtttcaggcctcggaactggcggcatgagtaccaaattgcaggccgctgacgtggcttgccgtgcgggtatcgacaccattattgccgcgggcagcaagccgggcgttattggtgatgtgatggaaggcatttccgtcggtacgctgttccatgcccaggcgactccgcttgaaaaccgtaaacgctggattttcggtgcgccgccggcgggtgaaatcacggtagatgaaggggcaactgccgccattctggaacgcggcagctccctgttgccgaaaggcattaaaagcgtgactggcaatttctcgcgtggtgaagtcatccgcatttgcaacctcgaaggccgcgatatcgcccacggcgtcagtcgttacaacagcgatgcattacgccgtattgccggacaccactcgcaagaaattgatgcaatactgggatatgaatacggcccggttgccgttcaccgtgatgacatgattacccgttaaggagcaggctgatgctggaacaaatgggcattgccgcgaagcaagcctcgtataaattagcgcaactctccagccgcgaaaaaaatcgcgtgctggaaaaaatcgccgatgaactggaagcacaaagcgaaatcatcctcaacgctaacgcccaggatgttgctgacgcgcgagccaatggccttagcgaagcgatgcttgaccgtctggcactgacgcccgcacggctgaaaggcattgccgacgatgtacgtcaggtgtgcaacctcgccgatccggtggggcaggtaatcgatggcggcgtactggacagcggcctgcgtcttgagcgtcgtcgcgtaccgctgggggttattggcgtgatttatgaagcgcgcccgaacgtgacggttgatgtcgcttcgctgtgcctgaaaaccggtaatgcggtgatcctgcgcggtggcaaagaaacgtgtcgcactaacgctgcaacggtggcggtgattcaggacgccctgaaatcctgcggcttaccggcgggtgccgtgcaggcgattgataatcctgaccgtgcgctggtcagtgaaatgctgcgtatggataaatacatcgacatgctgatcccgcgtggtggcgctggtttgcataaactgtgccgcgaacagtcgacgatcccggtgatcacaggtggtataggcgtatgccatatttatgttgatgaaagtgtagagattgctgaagcattaaaagtgatcgtcaacgcgaaaactcagcgtccgagcacatgtaatacggtagaaacgttgctggtgaataaaaacatcgccgatagcttcctgcccgcattaagcaaacaaatggaggaaagcggcgtggcattacacgcagatgcagctgcgctggcgcagttgcagacaggccccgcgaaggtggtggctgttaaagcggaagagtatgacgatgagtttctgtcattagatttgaacgtcaaaatcgtcagtgatcttgacgatgccatcgcccatattcgtgaacacggcacacaacactccgatgcgatcctgacccgcgatatgcgcaacgcccagcgttttgttaacgaagtggattcgtccgctgtttacgttaacgcctctacgcgttttaccgacggcggccagtttggactgggtgcggaagtggcggtaagcacacaaaaactccacgcgcgtggcccaatggggctggaagcactgaccacttacaagtggatcggcattggtgattacaccattcgtgcgtaaataaaaccgggtgatgcaaaagtagccatttgattcacaaggccattgacgcatcgcccggttagttttaaccttgtccaccgtgattcacgttcgtgaacatgtcctttcagggccgatatagctcagttggtagagcagcgcattcgtaatgcgaaggtcgtaggttcgactcctattatcggcaccatttaaatcaataagttacacatcattagtaccttccttattttttgactgggacaaatttgggaccgatgggttcaggatcgagtctatttgccgtgcgtgttcggtaaggtgattaggtgcaaggtgagcatatcgacgaaccatttcgatagactcccagcctcccatttcctgtaacactgacaacgggactccggcttgaaccagccaacttgcccaggtgtgtctcaagtcgtgaaatctgaaatcatcaataccagcccgtctcagcgccgctttccaggctgtgtttgcgtcataccgcatcttccttactgttggcgctttcgttccgtctggtttggtacagctttccttgtacacaaatacccaacggtgatgattcccgatttgttttttcaatacgcgacatgcagtatcattcagcgcaacgccaattgcgcggtttgatttactctcttccgggtttatccatgccacccggcgctgcatatctatttgttgccattcaaggttgatgatgttcgagcgtcttaagcctgttgccagtgcaaattcaacaacagactttaatggctccggacattcatcaatcagcctttgtgcttcatggggctccagccagcggatccgtttattctttggttgaggcactttaataattggtgccttatccagcattttccattcacgctctgcggctcttagtagggcctttataaatgaaagatgcgtagccttcgttgcaacggacgctggttttggcgtgtattctggaacaggtttccctttttttctgcatgcttctgccctgagtttccagttttcctcatgacgccggttcgtcattttctgcattgctgaataaatttttgattcagtaatgtctcttagttgcattcctgcgaaatgttgaagccagaatccgatccggcttttgtcatcgtccagtgattttttatgtgctttctcttcaagccacctgacacacgcttcctcgaacgttatatcaggtatttcaccaagtttgctgacccgccatgcttcagcctttagcttgtcatggagttctgtcgcctgccttttgtcctttgttccaagagactgtttaaatcttttaccgttcggcaatgtgaaactggcgtaccatatttcacctctgcggaagagtgacattttctttcctctgttatgccatcacccgcgctcacctggacagtatgcagcggagactgaagagccgcaatgcaggcttgtcgtgttgtgaggtaaggagatttattcttagtgggatctttgcgtgttgcctgaagacgccctgtgcgtatccagttaatggcagtcggtctggatatcttgagaaaatgacaggcctcatcgagtgtgaggctgtatggctccattatttcacctcttgttgtgacattgttgaaaaatggataccagctcgttgctgccagacgatccaaccgagagtcatatcccatgccatgtattcgttatcgccgttttttgctctccgacgatctactaagtcaccgaaacgcttttccatgaataattcataagcttcgcgttcatctggttctacttccagagataggagtgcgatttcataagcacggcgctcaatatcgtctcgcacgtcaaggctgctgatacgctctttaatttctttaatcagttctttgtcggtaaaagtggtcattatgctccagcctccggtgcttttggcattactgcccagtgagtgatattgacgttttcaaggtccccgacctgaaatgtccactgccattctccggtttctttttgtccccaggtgtaccagagagaacgccagccaattagccagccttctccgttagcatcgaataacaaaacactttcatttgctggtggcagttcagttgacactggtattactttgttttcctgtgctgcacatttagcttcaagcgcatcgaatttacgcaccaggtattcagcatctgtttcattcactttcagatctcgcggtacacatctcccacgaagaaacccttccatttcgaaaacattcatgcgcatttgcgtaactccgataactcgttaaaacgttccataaacatcccgtaggcatggcccggtgcctgtggaatcactttgaacatctctgttgccgggataccttccagtacaggccagaaagagccatcatcaagcccgagatcgcggtgttcggttgccagcataatgagatcggcatatttcactggcgtgctcataacaggaggtaacccgtatttctcacggattacggcgtctattttttcttccatccgtttatagtcaggaagaagtcgtttcagtggtgcggggatgtcctggcaatatgcttctgttgcatcatacattaaagcttcaaaagcaaattcctgtggcaccagctggctgcaaagcaccgcatgttgggcgacactgtagaagtgtgaaagatgtcctgcaaagcgacagatatttgaaagggaaaccgcgatatcgttaataacgatgtcgtctttatttatcctgtcataataaaaatgcttcccggaaaaagttttaataaatgacattttgttctccacgtatatgcgctgcaccgcgctgaattcgggtaaaaggaagccctcaccgtccggcgattattgagtcaattacatttccataaatgcccccgtaggggcggttagtttctccacaaaacagagaagaacacctgcggtggcagccgcccggatggattgggttatgagcccgtcgtccggtgatgctcttctctgttttgtaaaaaggacggtaccagccggaagcaagggtacaagctggtaccgccaagactacacacagcataaagttgtggtgccgggcgcctcccggtgcctggcgaaggttgcacaccaggcgggtgggtatccacagaaggtcgactgtcagcctcaacctttacccgcgtgcgctgagccgcattcaccacaacgctaaggattctctctggttgaaaatacttagctgttatgtgcctgcttttagccacatcaggcgaggtggacctagttattccccaacaacaaggatttggttattatgtaaccctccccaacaacgataaggatttatatggaacgatgtgtagataagtatgaggagaggcatgtgccgttaagacaaaagcctccagttcctccaaaaccacccaaggaaaactgagactaatatgaccagagacgattataaattttatattcactactcttatgtattggagaagatgaattacacgttgttaactcgtattgataaattaataacgttgatgttaatcgttctcggtttttcagttttcgccccgtacagtaatttatttattttcggtttgtttgttgccgtactttcggttcttcagttggtctatcagttcggccaggaggctgggatgtctaaagaacaagcgaggcattacaaaagactgctgattgagtctgatactctttctgaagatcagttgcaagctaggtatttaaaaatccaagataccgatagtaatccatggaaatcacttgaacgagcggctttcattcgggcctgcatttttgctggtgttccaactaagtacgatctaacaaccaaagaaaaatttattgcttggtgtgcgggagatctacctctagagaatgaactaacggatattaatgatgaccaacaagcataatccagttcacggacatgtacctccgaagccgaaaccaccgaaaccgaagaaatgagacataataggattggataatgagtcgaccaatagagccttttcatattccacctcgtcccaggccaccagatccaggcccaaagtgagggttactgatttttaaagagcgaagcgtccggtagggcgcttttttgttgctaacgaatcatcctggacttcatatgctccagggggctacttcgtgggcgtcctgcctgtttgttgtttcgcttgggtacattatgtatctcaaaggtacattgtcaagtataaaaaacctgccgaagcaggttcataaacattgattaggctttgattttgtatcttcttggttttcctgagaaaatcactgtaccaattatagagcaattaccgttgatcttaatgtaaggctcaggccagtttgggtttaacgctttgagataacgctgtgtcccatcttctatcaaccttttgaaggtggtttcacctgtatcgtgcatcaatgcaataacgtcgtcaccgtggcaggcaggtacttcaggatcgacaaaaatcatgtctcccgggcggtactcatcaatcattgaatcacctatcacccgcaagatataagtcatttccccacaggggacagggcagggatacgtttctgctgtgctcaaatcaacctcagaatatccaacttctttccatgctccggcctgtacccatgatatgacagggactaatgtgatttgtttattagtgattgaaacatcaggtttttttgtgatgttcgttgtctggtgttcttgatcgagccatcccacaggcaggtcgaaacatttttcgatgtgtcgtgccatgctgtcaccgatatttttagtagcaccatctcccataaacctgctggtctgggttggctcgcgatcaatcatagtggcaaaggaagaattcccgccaacaccatctctcagttttctggcgttagaccgccggatgtcatggattgttttcataacaaaattaaaacccttgtaccgttaaggtacaagtatcttgaaggttcattttaatcatgtaatatgtataccggaggtacatattgtatgaaagcgtattgggactctttaaccaaagaacagcagggcgagttggccggaaaagttggctcaacacctggctacttacggctggttttcaatggctataaaaaagccagttttgtgctggctaaaaaacttgagcaatgcacgtcaggtgcaattacgaaatctgacttaagaccggatatctatccgaaagattagcagaacactttcaatttttaaccacagaacgatgaggctaatcgtgggtaagcatcactggaaaatagaaaaacagcctgagtggtacgtgaaagctgtcagaaaaactatcgcggcgttgccgggtggttacgctgaagccgctgactggctggatgtaacagagaacgctttattcaaccgccttcgtgcagatggcgatcagatttttccgctgagatgggcaatggttttacagcgtgctggtggcactcacttcattgctgatgctgtggcgcagtctgcaaatggcgtatttgtgtctcttcctgacgtcgaggatgtggataacgccgatattaaccagcgtctgctggaagtcattgaacagatcggcagttattcaaaacagattcgttcagcaattgaagacggtgtagtggaaccgcatgagaagacagcaattaacgacgagctgtacctctcaatttcgaagctgcaggagcatgcagcactggtctacaaaattttttgcatttcagaaagtaatgacgcccgcgagtgtgcagctccgggcgccgtggcgtgtcgtgactgtggagaaactaacgcatgaacagtttaacaacacactaccgtcgctcgcaactgattgcgcttcctgtaccgggtggaaaagcgaaggtggagtattgctatgcagtaaatgtactaggtgacagggaaattgtaacccacagctttgcagagtgggctgtgggtgatttcaaccggcagaaggagacagtcctttgcgacaagttaaccgctggttcaaagatcactacggagtacccgtcagagtcattcgttgggagccggaaacacaacgggttatctacctccgtgaaggctatgagcatgagtgcttcagcccgttcgaacagtttcgtcgtaaattcagggaaatagaggtcggtcatgagcactaaattaaccggctatgtatgggatggttgcgctgcgtcaggcatgaaattatccagcgtggcaattatggcccgcctggctgatttcagtaatgacgaaggtgtgtgctggccatcaattgaaaccattgcccgccagattggcgcggggatgagtaccgtcagaacggctatcgcacggctggaagcagaaggctggttaacgcgtaaggcgcgtcgccagggtaaccgcaatgcgtcgaatgtttatcagcttaacgttgcgaagcttcaggctgcggcattttctcaactgtcagattctgacccgtcaaaatctgacgcatcaaaatctgacccgtcaaaatttgatgcgtcgaaatctggcaaaaaagcgggttttcacccgtcagaatctggcggggatccgtcagtaaaatcaaaacatgatccgtcagataaaaaaacttctcgtccggacgcttcgcaaccggacacgcagacggctgaacaggattttttaactcgccatcctgatgcggttgtattcagccctaaaaagcgccagtggggaacgcaggatgatttgacctgtgcacagtggctctggaaaaaaatcattgccctgtacgagcaggccgccgaatgtgacggcgaggtggttcgtcccaaagaaccgaactggacagcatgggcaaacgaaattcgcctgatgtgtgtgcaggatggtcgtactcataaacaaatctgcgagatgtacagccgcgtcagccgcgatccgttctggtgccgtaacgtgctcagcccgtcgaagctgcgggaaaaatgggatgagctttccctgcgcttatcgccgtccgtcagcacgtacaccgaaaaacgcgaagacccgtacttcaaatccagttacgacaacgtggactacagccagatcccggcaggattcagggggtgattatgagtcttttgaatgaagttcagaaattcattgaagcccatccggggtgtacttccggagacattgcggatgcttttgcaggttactcacggcagcgcgttctgcagtcagcaagcaagttacgtcatagtgggcgtgtggctcaccgttgtgaaggggatacacgcagacatttcccgcgccagacaaagatatcgccggaggcggaacggcaaccagttcgtgaaaccagacctgtgcgcaatttctatgtcggcactaacgacccgcgggtgattttgtgcctggcccgccaggcggaagaactggagtccaggggcttatttcgtcgtgctgcaaccgtgtggatggcggcattccgtgaaagccactcccagctagaacgaaacaattttctggcgcgtcgtgagcggtgcttacggaaaagcagcaagcgcgctgcatcgggtgaagagtggtatctgtcagggaattacgtgggggcttaatgacgacgttaactcaatgccagcagcaggtgctggatatgctgatttcttatcagaaagaacgtggcttcccgccaaccaatcaggaggtggcaaccatgctgggataccgttcggtgaatgcagcggtggagcatcttcgtgcgctggagaaaaaaggcgtcatcacgataaagcgtggcgtggcccgggggataacgcttcataccgcggtgaaggacgacgacagcgaggcggtcgggattatccgctcactgcttgccggtgaggaaaacgccaggctgcgtgcagcccactggttacatgagaggggcctgaaagtatgaagcttattctgccttttccgcccagcgtcaacacgtactggcgacaccccaacaaaggggcgtttgctggtaagagcctgataagcgcggcggggcgaaaattccagagcgcggcgtgcgcagcaatagttgagcagttacgtcgtctgccgaaaccaacgtcggcacctgctgcagtggagatcgtgttgtttccaccggataaccggatccgcgatctggacaactataacaaggcgctgtttgacgccctgacccacgcgggtgtgtgggaagacgacagtcaggtgaaaagaatgctggtggagtggggaccggttgtcccggaagggaaggtcgagatcactatcagtaagtacgagaaaacggcgggtgcagccgcctgattaagaggagaaacgaagtatgaataatctgatggtcattgatggtattgaagttcgtcgtgatgcttatgggcgttacagcctgaacgatctgcacagggctgccggttctctggataagcataagcctgcatactggctccgcaatgagcaaactgaacgtttaataagcgagttgcagatttgcaactcggtcaatatagagccagttaacgttattcgtggcggaaataaccaggggacgtatgtctgcaaagaactggtgtatgcctatgcaatgtggatcagcccgtcattccatctgaaggtgatccgtactttcgatatggtaaccagcacaccggaaaaattatccgggcaggctgctgacaagatgcaggctggcgtgatcctgctggactttatgcgccgggaattaaacctgtctaactcatcagtgcttggagcctgtcagaagcttcaggaggctgttggcttaccgaatctggcaccgcgctatgccattgatgctcctgctgacgcgcctgatggctcaagtcgcccgacactgtcactgagtgcactgctgaaacagtatggtatccgccttacggctaatcaggcatatcaccagatggcgaagctggggatcgtcgaacagcgcgaacgatacagccgtacagcgattaacaacatcaaaaaattctggtcgctaacggcgaaaggctgcatgttcggtaagaacatcaccagtccagcaaatccgcgcgagacgcagccgcacttcttcgaatcccgattccctgagctgttaaagctgctcgataccgttcattgaggtgaccgtgagagcactactgacacctgaaattgccccgcgtatggggatcgtattgttcaggcccggttcggagctgatgcccctgtttatgcagggacgtgtcctgctggagcctgagccggagcgttattcatcttttgccagtggagccgttcccgcggcatcacaaccgctggcggatgatcctgccgttcgggccgtgttccgcaatgaggcagtgatccgtcgtgctggtggcgtggaatgtcttgaaagctggttacttcgtgaaaagggctgtcagtggcctcattccgactggcacagcgagaacatgaccacaatgcggcacgctccgggagcaattcgtctgtgctggcactgcgataaccagctgcgcgatcagttcacggaacggctggaatcaatggcaacggataactgtgcccgctgggtgttatctgttgtgcgccgtgatctcggttttgatgatagccacgttgtgacaatgccggaactgtgctggtggctggttcgtaatgacctggcggataccttaccggaaagtgcagcccgtaaggcactgagattaccgaagcctgttgtgccgtctgtcacccgggagagtgaccttgtgccttcggttcctgccaccagcatcatccaggataaagcgaaaaaggtgctggagctgaaagtggatccggagtcgccggagtcttttatgttacgcccaaaacgtcgccgctgggttaacgaaaagtacacgcgctgggttaagacgcagccgtgcgcatgttgtggaaagcctgctgatgatccccaccacctgataggtcacggtcagggtggaatgggtacaaaagcgcatgacctctttgtgttgcctttgtgcagaaagcatcacgacgagctgcatgcggataccgtggcatttgaagagatgtatggctcccagctggagctgatatttcgttttatcgatcgtgcgttggcaattggtgtgctggcctgattttgtggagaaggttgatgcgtgatatgtatgaagttttggaccgctggggagcatgggcggcagcagataacagtggtgtggactggcaaccgatagctgcaggcttcaaggggcttttacctcatggcaaaaagtctcgcctccagtgcgaggatgatgaaggaattataattgatggatgtgtagccaggttgcgtaaatataagtcagaagattacgagctgataatcgcccactttgttattggaatttcgctccgtacaattgcaaagaagcggaaatgttctgatggtactttacgtaaagaattgattggcgctatagctttcattgaaggggtaatgtcaatgattaaattttctgattagataaaaagggcgggggttcccgcccttaattcagaatcgcccttttattgctaaattacgataataaacacctaatgcagtaagtcggcatccagttgaatttatcgcagcatagtacatatgttcagtatcaaccggctcaaccagtccgtggcggttacatttttgtagattttgaaaaattgatacattttcatcaatcggtgattcggaagttggttcaaagctaggatctaaatggaatacatgtgtagctgttgggaaccatacgggcaatttgcgaagagtatccaaagacactcttggtcctacctctctcagaacaacaaatcgagaaacatttgttttaaagactgggcgctgatcccacgcccccaatgcttgatccacaaagctatacagactacttggagtaatataacctaatatattagctcctgcgccatacaaagcttcgaccattaatgaagtaaatactccaccatcattaacttctttggcatactcatctcgtctacatgcagtaaggatggtagagccatctgcaagtacagtttctcctccttttagcattctttcctggccagcggccccagcctgacagcagtcgagaataataattttattgcgtatgttagttgctttattagcccaaaccataacatcacttattcttatgccattacttgatcttggcgaaaagtcatgtggaatcaacattccttcatcaatgttattatcaaaatatccatgtccagcaaagtaaaataatgcaacatcacactctccagaaaaaagattctgaatttcatattcaaggaaatctttgttgaggggggttgcactacagtgtgtaagtgttctagcctcgaaattaggcctcccatcggcgtgtctagataatgcttctgccatttttgcagcatcattttcacatccgctgagagcatctaattcagcatactcattgatcccaataaatagtgcttttttcatatggaagctcctaagccagctcacgaatggcagaaacgatgctttctgtattccacttgacgattttgtgagcggcttgcttaactttcatagacgtacgctcggagccccaaggctcaatggcaataattggctttctatattcttgagctattcggatctctgcatcaatccatttgctgtagctggcatatacaccagccaaaataattacaacacttgatggtgccatttgtgatcttatagcagagtaaagtgcaaaatcatcttgggcaccaattattggatcaactctgggtaccgagtagttcttaaagttgaaatacccacgattcttgagaagagccacaagctgttcataagtgtttgaatatttccaagagtgactaataaatagattaaaagttctcataaactctccattttaaggaagtgaagtaagtacattcttctcttagaaataaaaatatcaaatctattcacgcgtacgcaaaaagtattgtatcgtattaagagtggttagttcgccacacagcttaaaacccgccgtcgagcgggttttgtcgtttctggatccggctatttgttgagcttggtctataccgcagttatccattggctcggcttcttttacgtttccgcttctgatttgcggttcgtggtacaccctcaatttgcacctcctttatcggcgaggtgagagataactacaaatgcctcataacccaaatacctggctggagttggtacagagctggtggcgtggagacacaccactgggcgcagtaattatgtcgatcgttatggctggtttacgtattgcctattttggtggcggtggcggctggaagcgaaaaacgctcgagattttgctctgtggcgctctgacactgacctttgcatccgcgcttgagtatgtcggatggcctaaatcactttctgttgctattggtggtggggtggggctgatcggggtcgatgctattcgtggtgcggcaatgagagtaatcggtaacaagtttggtagctcgaaggagtaatttatgcaggaactaaatcctcagcgtaaagctttccttgatatggtggcctggtcagaaggaacggataacgggcgacaaccgacacgtaaccacggttatgatgttattgttggtggtgaactgttcactgattactccgatcaccctcgcaaacttgtcacgctaaaccccaaactcaaatcaacagccgccggacgttaccagcttctttcacgctggtgggatgcttaccgtaaacagcttggcctgaaagatttttctccagaaagccaggacgctgtagctctgcagcagattaaagagcgtggcgctttaccgatgattgaccgcggcaatattcgtcaggcaatcgaccgttgcagcaatatctgggcgtcgttacctggtgcaggttacggtcagtatgaacataaaatcggtgacctgattgcccgatttaaagaggctggtggggtggtaaatgaagttgagctataagctggttatcgctgcattcttctttactgtcatcggttctttcatctggtctgccaaccactactacagcaaatatcagcacgaaaagaaacgtgctgatgaggctgtacaaaatgctgaatctgcaacagccattacccgtaacgtcctgcaatcactgcaaatcgtcaatacagttatagaggttaaccagcatgcaaaacagcagatcgcactggagtcacagagaacccagaaagatatcaaagtggctgttgcggatgatggttgtgctgcacgccttgtgcctgctgccgctgctgagcggttgcggaagtacgcggacagtttacgtgagcactccggctacaacattaccgactagtctgacttctgaaacacctgtaccgttcataccaaatcctctgacttatggtgccagcctggagctgaatgtgagtctgttgtctgcactggctaactgcaatcgggataaagctgatattcgtaaaatagatgcagagagaactaaccattaagcaataaaattgtcaaattaatcagttgtcaaatgaatatacgttaaaggtatatgtcgacataatttcaccaagtacctcaatacatatactttttttatgaaagatactggggaaggaacttagctcttcaaggcatttcacataagtgctgatatcacttgcatcacgttcaaggaatttcacttggccaaaagaaggagtattaatcctagttctttgctggattatatggataaaatgtgtagttggtgaaactattactcttgaaatatcggaaatgatgtcttcttgaacttgccgataaagtaaatcctttgggtaatggtgtttgatctcgatggttgcaacattgccattatgttcagacgttaatatcgactggttataaagtgatatgtcaacagcgccgataccgagttttggatgctcacttaaagcagttagtgtgctgatttgattgagaataacaactaactcatcacgtatttgagtttcatgtttgcgattgtagaagtagcaattcagttcatttaactttttatgcatcctatcgtgactaattgcttcgatcagtaaatcctgaatcatacttttctctaggtaatccgaacggttgtaagtgacagtattgtgctggcatgtcattagtatgtaaaggtattgtgaatgccagcaagataacgaagtatcatcgatagaaaaactttacggcccactcgtaaaccgctttgtaaatcggttcatggtaaatactatcgatactattcagatgtgcgatcatcgcctccacagttgtagtggttgtttctaatatttcgattattgcagggcggtcatcatcttcatcgaagtattcgaacagcagtacaggtttaccatgccattcagcatctgagactctaaggttacaactaccgctcaactcaaagtgaattttgtaattaccttctacagaatggcctacggggaaaaagcatagggtgtcatctttgtttaaaagccattcccattcataactattcatttgtgaactcctgttcattgagtttcaacaactatcaactacatccagcgaagcataaaagatcgtttatggcaaaaccggagtggagtgcgattcgattctgagaaggatgccacgtatcgcacgcgaaccatccaagaggattatgcaatgccaccacgaaccccaaaagcctgccgcgttcgcggctgcccccataccaccactgactcgtcaggctattgcgaaagccacaaaagcgaaggctggaagcaatacaagccaggccagtcccgtcatcagcgcggctacggttcgaagtgggactgtatccgcgcgcgtgtcctgaagcgtgacaaaggcctgtgtcagttatgtctgcgtgctggtgtggtgcgtgaggcgaaaaccgttgaccacatcatctctaaagcgcgtggcggcactgatgccgacagtaatctacagagcctgtgttggccgtgtcataaggcgaagacggcccgtgaatggctgaagtaagaaccagttcccactgccagaggggaggggcgggtcaaatccctgtgacctgacgtcttccggactgcccgccccatcgtttttttatacccgcgaaaaatgaaatttaaccaggagtgccgcatatggctggaacggcggggcgttccgggcgtcgccccaagccaacggcgcgcaaggcgctggccggaaaccccggcaagcgagccctgaataaagatgaacctgtttttacgcccatcaaaggtgttgagccaccggagtggttcgctgaagaagatctccctctcgctacgatcatgtggcaactgacaactaaagaactctgcggtcagggtctgctgtgcgtgactgacctcgcggtgcttgagcggtggtgcgtggcctacgagttctggcgacgtgccgtgaaaaatattgccagacagggcaacaccatcaccggtgcaatgggcggtatggtcaaaaatccggagctgaccgccaaaaaagaacaggagtccgagatgagcagtacgggggcaatgctcggactcgaccccagcagccgccagcgtctgattggcctggcggggcagaagaaagccactaacccgtttctgaaaatcatcgaatcatgagccggaaatcttaccccaacgtaaatgctgccaatcagtatgcccgtgatgtcgtgcgcggaaagattgtggcctgccagtttgtgattcaggcctgccagcgccatcttgatgacctgatggaggaaaaaagtaagtcgtttcgttaccgcttcgacaaggacctggctgaacgggccgcgaaatttattcagctgttgccgcacaccaagggtgagtgggcatttaaacggatgcccatcacgctggagccgtggcagctatttgtgatctgctgtgcgtttggctgggtcaataaaggcacccggttgcgccgcttccgggaggtgtataccgaaattccccgtaagaacggcaaatcggcaatctctgccggtgttgccctgtattgttttgcctgtgataacgagttcggcgcggaagtgtattccggtgccacgacggagaaacaggcatgggaagtctttcgtccggcacgactgatgtgtaaacgcacacccatgctgacggaagcgttcgggattgaggttaacgcctcaaacatgaaccgtccggaggatggtgcgcggtttgaaccgctgatcggtaaccccggtgatggttcatcaccccactgtgccgtggtggatgaatatcacgagcacgccacagatgcgctttacaccacgatgcttaccgggatgggggcgcgacgccagccactgatgtgggccattaccaccgccgggtacaacattgaggggccgtgctacgacaaacggcgggaagtcatcgagatgctcaacggctcggtgcccaacgatgaactgttcgggatcatctataccgttgacgaaggcgacgactggaccgacccgcaggtacttgaaaaagctaacccgaatatcggtgtgtcggtttatcgcgagtttttgttaagccagcagcaacgtgcgaaaaataacgcccgtctggcaaacgtctttaaaacaaaacacctcaatatctgggtgtcggcgcgttcggcgtatttcaacctggtgagctggcagagctgcgagaataaatcactgacccttgagcagtttgaggggcagccgtgcattctggcctttgacctggcgcgtaagctggatatgaacagtatggcgcgactttatacccgcgagattgacggtaaaacgcattactacagtgtggctccgcgcttctgggtaccgtatgacacggtgtacagcgtcgagaaaaatgaagatcgccggacagccgagcgctttcagaaatgggtggaaatgggcgttctgaccgttaccgatggtgcggaggtggattatcgctacatcctcgaggaggccaaagcggcgaacaaaatcagcccggtcagtgagtcacccatcgaccccttcggggcgaccgggctgtcgcatgaccttgcggatgaagacctgaaccccatcaccatcattcagaactacaccaacatgtccgacccgatgaaagagctggaagcggcaattgaatcggggcgttttcatcatgacggcaatcccatcatgacctggtgtatcggcaacgtggtcggcaaaaccattccgggtaacgatgatgtggtgaagcccgtcaaggagcaggcggaaaacaaaattgatggtgcagttgcgctgattatggcggttggcagagccatgctgtacgagaaagaagacacgctgtctgatcacattgagtcctacgggatccgctcgctttaactgaggtaattatgatcatgctgattctcgcgcctctggtgggcgtgctgggtgcgcttttgctggcgtatggtgcctggctgatttatcccccggcggggtttgttgttgccggggcgctgtgcctgttctggtcgtggctggtggcgcgatatctcgaccgtacacagccgtctgtcggcggaggtaaatagtgttcttttcgggattatttcaacgaaaaagtgacgcaccggtgaccacgccagcagagctggcggatgctatcgggctgtcatatgacacctataccggaaagcagatcagcagccagcgggccatgcgactgacggcggttttttcctgcgtcagggtgctggcggagtcggtcgggatgttgccctgcaacctgtatcacctgaacggcagcctgaaacagagagccaccggcgaacgtctgcataagctgatctccacgcatcccaatggctatatgacgccgcaggagttctgggagctggtggtcacctgtctgtgcctgcggggaaacttttacgcctacaaagtgaaagcatttggcgaagtggctgaactgctgcccgtcgacccaggttgtgtggtaccgaagcttaacagtagctgggaaccggtttaccaggtcacattcccggacggctccacggatgtactgagccaggaagatatctggcatgtgcgcacgctgacgctggacggtctggtgggactgaatcccatcgcctatgcccgcgaggcaatatcgctggcagctgcgaccgaagagcacggggccagactgttcagcaatggtgcggtgacgtccggtgtgttgcgtacagagcagacgctgtcggatcaggcttatgagcgtctgaagaaagattttgaggagcgtcacaccgggcttggtaatgctcaccgcccgatgatccttgagatggggctggactggaagtcgatggcgctgaacgccgaggacagccagttcctggaaacccgcaagtttcagcttgaagaaatctgtcgtctgttccgtgtgccattgcacatggtgcagaacaccgatcgcgccaccttcaacaatatcgaagaactggggctgggatttatcaactattcactggtgccgtatctgacccgcattgagcagcggatcaacaccggactggtacgaaaaagtaagcagggcgtttattacgccaaatttaacgccggggcgttactgcgcggggatatgaagtcccgttttgaagcctacgccaccgggattaactggggaatttactctcccaatgactgccgcgacctggaagatatgaatccgcgtcccggtggggatgtctatctcacaccgatgaacatgaccacgaaaccctccgatggcagtaaagccggtaagcagaaggataacgccaatgcagacgaaacaacgtcttgatgtaccgctgagtctgaaatctgtcagtgactccggtgagtttgaagggtatggctccgtctttggtgtaaaggacagccacgatgatgtggtgatgtccggggcatttgctgcttccctgcgggcgtggagtgacagaaaagcgttacctgcgctgctctggcagcaccgcatggatgaacccatcggtgtttacaccgaaatgaaggaagacgatgtcgggctttacgtcaggggacggttgcttattgatgatgatcccctcgcaaaacgcgcacatgcacacatgaaggccggttcgttaaccggcctttctattgggtacgtcctgaaagactgggaatacgaccggagcaaagaagcctttctgttgaaagaaatcgacctctgggaagtcagtctggtgacgtttccgtctaacgacgaggcgcggatcagcgacgtcaagaacgcgctggcccgcggggaaatccccgaacagaaaaaaatcgaaagagtcctgcgtgatgtcggactctcccgtacccaggccaaagcattcatggccgggggctatggcgcactgtccctgcgcgacgctgaggatgtgggctctgcactgaatgcactgaaaaatctgaacttctaatcaggagaaatacgatggcggttgatattaaagatgtcgaacaggtcgcgcaggagctgcagcagaagtttgacgacttcaaagcaaagaacgacaagcgcgtggatgcgattgagcaggaaaaaggcaagcttgccgggcaggtggaaaccctgaacgggaaactcagcgagctggaaaatctcaaaagcgaccttgaaaaagagctgcttgagctgaaacgtccggcaggtggagcgcaaaataaactggccaccgagcataaagaggcgtttgtgggctttctacgtaaaggccgtgaagacggtctgcgcgatctggagcgtaaggcattgcaggtgggtaccgatgaagacggtggctacgccgtgccggaagaactggatcgcaacattcttaacctgctgaaagatgaagtggtgatgcgtcaggaagccacggtgatcaccgttggcggttccgactacaaaaaactggtgaatctgggcggtacggcttccggatgggtgggggaaacggatacgcgatcccagactgccacctccagactggagctgattgaacctctcatgggggaaatctacggcaacccgcaggctacccagaaaatgctggacgatgccttcttcaacgtggaggcctggatcaacagcgagctggcaaccgaatttgccgaacaggaagaaattgcctttacctcaggcgatggcaccaagaagccgaaagggttcctggcgtatgaatccactgatgaaaccgacaaggtccgggcgttcggcaaacttcagcatattgtatccggcgaagcgaccgcggtgaccgcagacgccattatcaaactgatttacacgctgcgtaaggcacaccgcactggcgcgaagttcatgatgaacaacaacagtctgtttgccatccgtctgctgaaagacaccgagggtaactatctgtggcgtccggggctggaactggggcagccgtcctctctggcgggttacggtatcgctgaaaacgaacagatgccggatatcgccgctgatgcgaaagccattgcatttggtaacttcaaacggggttacaccatcgttgaccgtatcggcacccgcattctgcgtgacccgtacaccaataaaccgtttgtcggtttttataccaccaagcgcaccggcgggatgctggtcgattcgcaggccatcaaactgctgaagattgcagcggcgtaatcactcaggggcgcggaaccgcgccccctgttctgacgggtgaagaatcatgatcctgaaacaagatctgaaatggtcaccggacggtatgcgtgttgaggtcattcgggccggtgagtatgacgacggggcgcttcctgcccgggtgcaggagattgcacttcaggccgggttagcagagcgcggaaccagtgcaaaaagcagtaaagcggcaaaagagaaaaaagccacgaccagtaaagagggctgagtatgcttctgacaatggaagagattaaagcccaactccggctggatgaggatttcgatgctgatgaccgccatctgcaactgctggcctgtgcggcgcaaaagcggacggaaacgtatctgaaccggaagctctatgcaccggatgaaaccattccggagagcgatccggacgggctgcacctgccggatgatattcgtctggggatgctgatgcttatcagccatttttacgaaaaccgctcgtcggttacggaagtggagaaactcgacatgccgcagagttttggctggcttgtcggcccgtacaggtactttccgcaatgaaaattcgtcaggcgcagaccagcgcaacctacattctgccggaccccggtgaactgaataaacgcgtcctgatccgcctgcgggtggatatgcccgcggataactttggcgtggagcctcaatacccggttacgttccggacatgggcgaaggttatccagaccagtgccaccacctggcaggaaaccgcgcagaccggggacgccatcacccattacatcaccattcgttaccgccgggggatcaccgctgattatgaggtggtctgcggtgacagtgtgtaccgggtgaaacgtcagcgcgatctgaacggggcgcggcgctttctgctgctggagtgtacggagctgggcgaatgtaggcagagtcacggaggcagcaatggcgactcccttttttcacgttgatgttcagcagcccgccgagatgcgctttaaccgcgcccgtgtccggcgggcgtttgtcacgattgggcagcgtcatatgcgtgatgcccgtcggctggtgatgcgccgtgcgcggtcggcaccgggtgaaaaccccggttatcagaccggacgcctggctcgttcgattggttatatggtgccgagagccagtaaaaagcgagccggttttatgacacgcattgcccctaaccagcgcaacgggaaggggaaccggatgatctctggtgacttctatccggcgtttctgttttttggtgtccggggaggagcaaaacgtcgtcgtagtcatcatcgtggtgcatccggtggcagcggctggcgactggctccacgtaataacttcatggtggaagcgcttgaaaagaaccgcagctggacacgctattttctggcgcgggaattgcgtaaatcactgaagccggagcgacgacacagatgaaactgacgcctgttattgctgcgctgcgtgcccgctgcccgtattttgaaaaccgggtggcaggcgcggcacagttcaaaaatctgccggaggtcggaaagctgagactcccggcggcgtatgtggtaccgggtgatgactctccgggagaaaacaaaagccagaccgactactggcaggagctgaaagagggcttctccgtggttgtcatactgagtaacgggcgtgatgagcgcggtcagtttgcctcgtatgatgtggtggacgatgtccggcagatgctctttaaggccctgctgggctggaacccggaagcgtgcggtaacccgattacctatgacggcggcacgctgctggatctgaatcgtcatgagctgatttatcagttcgatttttcggtcatcagcgagctgactgaagacgatacccgccagcaggatgatctgaacagtctggatgaactgcaaacgctggcgattgatgttgattatctcgagcccggtaacgggcctgacggcgatatcgaacatcacaccgaaataacccttccttcctgaggatcctcatgtttgtcaaacctgttaaagggcggtcagtgcctgaccctgcccgcggcgaccttttgcccgccgaagggcgaaatgttgatgagaacaactactggctgcgccgtgaagcagcgggtgatatccggcgcgtgaataaaaaggtgaacaccgatgacgataagctttaacaccattccgtcgaatacgctggttccgctgttttatgcggaaatggataaccaggcggcgaatactgcacaggacagcggggcatcgttgctgattggtcacgccaataacggtgcagaaattgttgccaacagtctggtgctgatgccgtcggcagactatgcacgccagatttgtggtgcgggaagtcagctggcgcgtatggtcgaggcttatcgccagaccgacccgtttggcgagctgtatgtgattgccgttccggaagccacaggcgcggcggcaacggttacgctgacagtgaccggggcggcaaccgaaaccggcacggtgaatgtttatgtgggacgtacccgcgtgcaggcaccggtgaccaacggcgataacgtcacgacgattgccagcagtatcaaagatgccattaatgccgttccggccctgccgtttacggcctcatcttcggcaggcgtggtcacgctgaccgcgcgtcataaggggctttgcgggaatgaaattcctgtcagcctcaattactacggctttggtgggggcgaagtgctgccagcgggcgtacagattgctgtggcgacggggagcgccggaacgggcgctccggttctcaccggcgcggtggctgcaatggcggatgagccgtttgattatattggcctgccgttcaacgacacggcctccgttaacacgctggtgacagagatgaacgataccagcggtcgctggagctatgcgcgtcagctgtatggtcatgtgtatacggcaaagatcggcacgctgtcagaactggtgaacgcaggtgaccagtttaaccagcagcacattaccctggcgggatacgaaaaagagacccagacgcctgccgacgagctggcggcaagccgtaccgcccgcgcagcggtgtttattcgcaacgatccggcacgtcccacgcagaccggtgagctggtgggtatgctgcctgcgccgaaggggaaacggttcacgatgaccgaacaacagaccctgctgtctcatggcgtggcaacggcgtatgtcgaaagcggggtgctgcgcattcagcgtgatgtcaccacgtacaggaaaaacgcttacggtgttgcggataacagctacctcgacagcgagacgctgcataccagcgcgtatgtgctgcgcaaactgaaatccgtcattaccagtaagtacgggcgtcacaagcttgccagcgacggtacccgctttggtcccggtcaggcgattgtcacaccggcggtgatcaaaggggaactgctggcaacctaccgtcagcttgagcgtgcggggatcgtggaaaactacgaactgtttaagcagtacctggttgtggagcgtgatgccagcgatccgaaccgcctgaacacgctgttcccgcctgactatgttaaccagttgcgtgtttttgccgtggttaaccagttccgtcttcagtattcagaggagtctgcataatggcccgtatcgggggaacctgttatttcaaaattgacggtcagcagctatcgctgaccggcggcattgaggtgcccatgaacaggacggtcaatgatgacatcatcggcctggacggttcagtggaccgcaaggaaactcaccgtgcgccttatgtcaaagggacattcaaggtgccgaagaattttccggtgagtaaaatcacctcgtctgatgagatgaccatcactgccgagctggcgaacggtcaggtctatgtattgtcgtccgcctggctgcacggcgaagcgaaccataatgccgaagaaggcacggttgatcttgagttccacggtgaagaaggggattaccagtaatgaaagagcttgagttaaagaaaccgattatcgctcatggtgagacactctccgtactggagtttgatgaacccaccgggaaggatgtccgcgagctggggtatccctaccagatgaatcaggatgagtccgtcagacttctggcgcatgtggtgtcgaaatacattgtgcggctggcgaaagtgccgcaaagctctgtcgaccagatgtctccggcagacctgaatgcagcggcgtggcttgtggctggttttttcctccaggcctgacggctgaatacctcactgatcgcttctttgactgcgccagctactggcgcattaatcccttcgaattgctgagtatgccgatcagtgaaattcccttgctggtcagtcaggcaaacaggatagagcaggagaaacgcacacatggctgaatttgagcttaaggcgttgatcaccggtgtcgacaggctttctcccgcgctgtcgaaaatgcaaaagaaaatccggggatttaaacgccaggcggaagaagcgtcacagggtgggctggcgcttggtggcggactggctgcgggtctgacgctttccctgaaatcttatgccgatcaggaaaacgccgccaccgggctgaaagtcgccatgatggatgcgaacggcgaggttggaaagagctttcaggacatcaataaactggctattggcctgggtaaccagctacccggtacaacggctgatttccagaacatgatgcagatgctggtgcgtcaggggatcccggcagaaaacattctgggtggtgtgggtaaagcgacagcttatcttgcggtgcaactgaaaaaaacaccggaagcggctgctgagtttgctgcaaagatgcaggatgctaccggaacggcgtcagaagacatgatggggctgttcgacactatccagaaggcgttttatctgggcgttgacgataccaacatgttgtccttcttcactaaaaccagttctgttctgaagatggtgaataaggacggtcttcaggctgcacagagccttgcccctatcagcgtcatgatggatcagatggggatgaacggggagtcggcaggtaatgccctgcgaaaagttatccagtccggattaagcattaagaaaatcagggacgtcaataaagtcatggcccgccagaaactcggagtgcagctcgattttactgacagcaaagggagttttggcggtcttgataacatgtttaagcaactggcaaagctgcgaaaactgaccgacgttaagcgaacaggtgtacttaaggcaatatttggtgatgatgccgaaacccttcaggtggtcaatgccctgatcgataaaggaaaggatggttacgatcagatccagcagaagatgaataaacaggccagcctgaataaacgtgttcaggcacagcttggtacgctgtccaacctgtgggaggcaatgacagggaccgcaactaacggccttgcggctattggcggcgcattttctggtgacgctaaaaatatcacgcaatggctgggggagttgggggagaaattcacgaagtttgcggatgaaaatccccgggttattcgcggcgtcgtcgggcttgctgccggtcttgcgattctgaaactgggattgatgggcgtgggcagtgccatcagtattgtcagcaggatcatgtcgatgacgccgattggcatgattgcgacggcgatagccctggctgcgggattaattatcactaactgggatgttgtcggaccttattttaagaaactctgggaaaccattggtccttattttgagactggctgggaacttcttaagaaggtttttgcctggtcgccgctggggatggtgatcaataactggggaccggttgttaagtggtttcaggatatgtgggataagctgaagccgattattgaatggtttaccgacagttccggtgacacggtcgatgccattaactcggcgcagtggggcgcgggtgcttatgatgcttatgggacgggaataccggcgcggggatacacaccttatccggcggtggatccggctcaggcaaacaacgcctccggtgccacaggctcgaatcccttcatgattaacaaagcttctgcgccaaaagttgatggtgagatcaaggtctcttttgtgaattcgcctccgggtatgcgggttatggaaacgcgatccagtggcattgatattaatcacgatgttgggtacaccagatttaggtaaagacgaacagggagggccgcccctccctgaacttactgtgcgaacacgcaatttcggcctgatggggagccgacaattctggacattttttcgcaaataacagttacttgttctccttttttaagagcagcagctgttgatttttcagagtcttgcatctccattcttgctggcatgaattcattttcagttctgaatttaataattatagagtcagtaaagtccttatcaatggattgtacgatacctctaacggcgattaatttaccttttaactgttcatcggtagcgacttcattttcttcatactgtttaaacagctgtcgagcagtagtgttgtagatttctttttgcggtgccgcagcttccgtatcggatgagtatgaagaattagagcctttatcgttattgcctgcaaaatatccaataatcaccaacccgatgaaaatatataaaatccattttaataatttctttatgttatcaccttaatgctaataatttatatagttacaaatggtaatggctaccactacaaattatggcattaccagtaaatattactactgataataaatatgggacttatatgacgtggaaagacaagcttcaggatgcgtcatttcgcagcgtgccgtttaaggttgaagaagaaagtgcgggaaccggtcgtcgtgtggaaacacatgaatacccgaaccgcgacaaaccctataccgaagacctggggaaaatcactttccgcccgtccatcacggcttatgtggtgggagatgactgctttgaccagcgtgatcgcctgattgaagcgctgaataaacccggtcccggcacgcttgtccatccgacatacggtgagttgaaagtctgtgttgacggggaagttcgggtcagcacatcgaagagtgaagggcgtattgtccgctttgacctgaagtttgtcgaagcgggagaactctcttaccccacatcaggcgtggcgacggcgcagacgctgatgtcatcctgttctgcactggatgactgcatcagtgacagcttcagcggtttcagtatcgatggcgtggcggattttgtgcagaacgacgttatcggtaatgccagcacaatgcttgggtatgtttctgatgcgatgaaagtggtggattctgctgtatcggatgccgccaggctgttgcagggggatatctcggtacttatgccgccgccatcgtcaggaaaaaatttcgttgagcaggtgcagaaaatgtggcgtaccggaaaacgcctttatggtaacgccagcgacctggtcaccatgatcaaaacgctttctggtgtcagcctcggcagcgatctgcaaccgcgcggcgtctggaaaacggacagtaaaaccaccgccacggcgacgcagcagcgtaacgtggttgccagcacccttcgtacgaccgcaatcagcgaagcggcgtatgccgtcacccgattgcctgcgccaataacttccgcggtgatgcagaattccgcagtggggcaggcaacaacacccgcgcagagcactggctggccttccgtcacgcatccggcactgaacaatgcaccggcggtgaaaaacacggttgacctgccgacgtgggaagaactgactgacattcgcgacacactgaatacggcaattgataaggagttgtcccgtacaaccagcgatgcgctgtttctggcgctgcgccgggtgaaagcagatctgaatgcggatatcaacacgcgccttgaacagtctgcacggatcattcagcgcacaccggatgaggttttacccgcgctggtgctggcggcgacctggtttgataacgcggcgcgtgacgcggacattatccggcgtaatgccattacgcatcccggctttgtgccggtgatccctctgaaggtgccagtgcaatgaacgacaatgtcacgctacgggtaaatggccgggagtggaatggctggacatcggtgcgcatcggtgccggtattgaacggctggcgcgggatttcagtgtggagatcacccgccagtggccgggtgatgagggtattaccacgcttcagccgcgcattaaaaacggttcaaaagtggaggtgctgattggtgatgagcgggtgatcaccggctgggtggaggcgacgcccgttcgttacgatgcccgttcggtcagcaccggtattgccggacgcagtctgaccgctgacctgattgactgtgcagccgaaccgacacagtttaacggacgatcgctggtacagattgcgcaggcgcttgctgcgcctttcggcattgaggtggtgaacagcggtgcgccgtcgggtgttattcctgatgttcagcctgatcacggtgaaacggtgattgaggtaatcaacaaaatactcggtcagcagcaggcgctggcttacgacgacccgcacggcaggctggtgattggcggtattggctcaacgcgggcacataccgcgctggtacttggggaaaacatcctttcctgtgatacggagaagagtatccgggagcggttttctgtttaccaggtggcggggcagcgtgccggaaacgacgatgatttcggtgaggccaccaccaccgcgctgcgggcccgcacagaggacgcatttattgcccgttaccgtccgatgtatatcaggcagacagggcaggctacgggggcaggctgtattgcgcgtgctgactttgaagcccgacaacgggcggcgcggacggatgaaaccacctatgtggtgcagggctggcgacagggtaacggtacgctgtggcagcccaaccagcgggtgattgtcttcgatccggtctgtggtttcgacaataccgaactgcttgtctcggaagtcacgtttactcaggaccagaatggcaccctgacggaaatccgtgtcggcccacctgatgcttatctgcctgaacccgaagcccccggcgcgcggaaaaagaaaaaagccagagtacaggaggacccgttctgatgaaggcgattgaaaccatacagcgacaactcctcggcctgattgggcgggcggtggtgaaaagcatcagtgccgccacgaaatgtcagaccgtggatgtgtccctgattgccggtgaacccaaagccggggttgaacatcttgaaccctacggttttaccgcaagggcaaacagcggtgcggaagcggtggtgttgtttccggatggtgaccgttctcatgcggtggttgttacggtgtcggaccggcgctaccgcctgaaagggctgcagacgggtgaggtggctgtctatgacgatcaggggcagtccgtgacgctgacccgggaggggatcgtggtggacggtgcaggtaaaacgatcacgtttcgcaattcacctaaagcacgttttgaaatggacctggaagtgaccggacaggtgaaagacctgtgcgactccagcggcaccaccatgtcagcgatgcggcttgcctataacgggcatcgtcacagagagaacggtcagggcagtaacaccgacaaacctgataaatcgatggaggcatgatggaactgtggctgacggtgaacggtaaacgcacctgcgccagcgcaccgctggatccgctgacccgcgccgtggtgatttccctgtttacctggcggcgggcggagcctgatgacaacgccgacgtcccgatgggatggtggggggatacctggcctgcggtacagaatgaccgttacggctcccgactgtggctgcttcagcgcagcaaactgaccaatcagctggtgctgacggtaagggggtatatccgcgaatgcctgcaatggatgattgatgacggcgtggtgtcccgtattgatctggatatccgccgcaccgggattaatgaactgggtaacagtatcactctctggcgtcgtgacggaccggtaatgatttcttttgatgatctgtggagtgcgataacgcatggcggacagtgaatttcagcgcccgacgctggcagaaaatatcagtatgctccgtaacgatttattcgccaggctggacgtcagcgacacgctccggcgcatggatgaagacgtgcgggcaaaggtgtatgcggcggcgctgcatacggtttacgggtacatcgattatctggcaatgaacatgctgcctgacctgtgcgatgagtcctggctggcgcgacatgctgcgatgaaacggtgtccgcgcaagggggccacgactgccagcgggtatatgcgctgggaaggcgtcagcgatggcctgaaggtgaccgccgggagtgttattcagcgcgatgacctggttcagtacacggcaactgccgatgcaaccagcgccggtggtgtcctgcgcgtgccgatcgcctgctcaagtgcaggcgcggtcggtaacgctgacgacggtacgtcattaatcctggtcacgccggttaatggtctgccgtcttccggcgtggcagacactctgacaggtggatttgatactgaagatctggaaacgtggcgcgcccgcgtcattgagcggtattactggacgcctcagggcggggctgacggggactatgttgtctgggctaaagaagtgcccggcattacccgcgcatgggcataccgtcactggatgggaacggggactgtcggtgtgatgattgccagcagtgacctgattaatcccattccggaagaatcaacggaaacggcggcaagacaacatatcgggccactggccccggtggcaggctctgatttgtatgtgttcaggccggtggcgcatacggtggattttcatatccgtgtgacgccggatacaccggaaatacgggctgccatcaccgcggagttgcgttcgttcctgctgcgtgatggttatccgcagggagaactgaaggtgtcgcgtatcagtgaagcgatttccggtgcgaacggggaatacagccatcaattgcttgcaccggcggaaaatatctccattgcaaaaaatgaactggcggttctggggacgatttcatggacgtgacaaacgatgattacatccgtctgttgtcggcactgctgccgcccggtccggcgtggtcagccagcgatccggcgattgccggtgcggcacagtcattaacccgcgttcatcagcgtgcggatgccctgatgcgggagctggatccgcgcaccaccaccgaactgataaatcgctgggagcgtctgtgcggcctgccggatgaatgtattcccgcaggaacacagacccttcgccagcgtcagcaacgactggatgcgaaggttaacctggcgggcggcatcaatgaggatttttaccttgcacagcttgctgccctaggcagaccagacgccaccatcacgcgatacgacaaaagcacgttcacctgctcatcggcctgtactgacgcggtgaatgcgccggaatggcggtattactggcaggtcaatatgccagccaccaccaacaccacctggatgacatgtggcgatccctgtgattccgcactgcgtatctggggcgacaccgttgtcgagtgtgtgcttaacaaactctgcccgtcgcatacctacgtaatttttaaatatccggagtaatccatgcatcgtatagacacgaaaaccgcgcagaaggataagttcggcgcgggtaagaacggttttacccgtggtaacccccagactggcacacctgccaccgatctggatgatgactactttgatatgttgcaggaagaactctgcagcgtggtggaggcatccggtgccagcctggagaaggggcgaaacgaccagttgcttaccgcgcttcgtgctctgctgttaagccgcaagaatccgtttggcgatatcaaatcggatggcacggtgaaaacggctctcgaaaaccttggtttgggagaaggtgctccagctattggcgttccgttcttctggccgtccgctgcaatgccaaatactgtaatcgacagctggtcctgtatggtgtttttgaagttcaacggcgcgaaattctctgccactgattatcctgtgctggcgaaagtgtttccttcgctggtattacctgaagcccgcggtgatttcattcgtatctgggatgacgggcgaggtgcagacggtggtcgcgaattattaagctggcaggcagctacaaacttttctcagtttgccgggaatataggcgaaggtgcgggacacgcaattaactttcatgatggcatcgccggaaatcagccaggattttcacgatttaatttcaccagtaactctgtgggtgatggtgtgaattttgttgcagtcagaccgcgaaatattgcatttaactttctggtgagggctaaataatgaaacctgtttttgatgaaaatgggctggctacagtgccgggcgatatgcgttgtttttattatgatgctgaaacatctgagtatacgggctggtctgatgaatatattaatactggcgtaagtatgcccgcctgttccactggtattgaccctggcgaaaacattccgggaagagtggcagtatttacaggtaagggatggagccatgaagaagaccatcgcaatgagactgtttactcaatcgaaaatggcgcagctgttacagtggattatatcggtgccatcaaagacggttatgtcacgatttcaccgttaacgccatacgataaatgggatggtgagaaatgggtgacagacactgaggcacaacacagtgccgcagtagacgcggcagaagcacagcgccaatcactgattgatgcagcaatggcttccattagtctgattcagctgaagttacaggccggacggaaactgactcaggcagaaacaacccgacttaacgccgtgctggattacattgacgcggtgacggcaacagataccagcaccgcgccggatgtcatctggcctgaactgccggaggcgtaggccattcaatatctggcgcaccggaagtatcgaccagctccagtgcgtccagataatccagccacaaattatattgcgtcagttcgtcacctttcagacgaccaatagccgctttaccgggccattgcttactgttcatgtattcgttggcctggttaattagtagctgtctttctgattcagtaatttcaataagctcttcatgcgtgggtggaggaatatctgcccacgcaggcagcccatcatctccggcaatacggatttttccttgtggcggttcagccataaactcactgataatattttgatttacttccttagcgtctgataaatcccatccctctgatttatatttatcaatcatatccacagggaaaaaagcattatgccttgcgctataaacatattcgtccatataaatcaccctgaataaaattactcaccaacagcccaccaactgtaattcatcgataccgtgtcgctggttgatgacgttctgtaagcagaattaaagccggttaacgttgggccttctgcagtcatcacgaaccctcgcccagcgcctaaaggcgcaccgccatcaccagaatgggtaagaatggcgcagtccgcttttttagggaaagggataggaaatgtaatcctcattgtttgcgtcgataatttcggcatagcctcacctcgaccatattgcagaattttaccgttgggtaatttcatccatccatcaccactggcaaaagaagccatgtccggtatctgattttcccctgttccccacaccccgtttcgctgcttctcccaaaccaacgtttatgaaaatgcagaaataacgagcaaatggcatcattcctgcttttgtcagggggatctaccatgcttattggctatgtacgcgtatcaacaaatgaccagaacaccgatctacaacgtaatgcgttgaactgtgtaggatgtgaactgatttttgaagacaagataagcggtacgaagtccgaaaggcccggactgaaaaaactgctcaggacattatcggcaggtgacacactggttgtctggaagctggatcggctggggcgtagtatgcggcatctggtcattctagttgaggagttgcgcgaacgtggcattaattttcgcagcctgacggatgctattgataccagcacaccgatggggcgttttttctttcatgtgatgggtgccttggctgaaatggaacgagaactgattgttgaacgaacaaaagctggactggaagctgctcgcgcgcagggacgaattggtggacgtcgtcccaaacttacaccagaacaatgggcgcaggccgggcgattaattgcatcaggcgttcctcgccaaaaggtggcgatcatctatgatgttggtatatcgacactgtataagaagtttccggttggagataaatgaaaccgtagcacgtcgtatgcaagaacgtgctacggttagctggtgaaatgtcgatagtgcgagtgttgaataatttctagccgttattgattttacgtatttttgtatgagatgatttgcatctcctgtcaccgaccatctatgactatacgtcaccatttctagggctgctatgtgccaagagcggtaattgacagagagcagccctatctcagtggctttatttttttagagattgcattcgttcattgaatatgtccaatgtgtcttgaaattcaacaaagcctctatcctttataaggcttttaattaagttaggaaaatcactttctacaccagctgtaatgaaatctaactcgcctaatttattcgggatgttttcagaaacaaatttgttaataacctcaagaaattgatcaggcatggcacatccgcttgcgactaaatgcaaacattccataatatcgcttactgttgccagtggtaggtttaaaatattactgttaataaacttgtctataatgtcaacgacctcaggagagccaatccttttgatgttcaataataaactcttagtgatggatcttttccacttatcatcaaataattgtatttttgttaacgctaatgttaatagttcagtgtttttgtattcgtaattatgattctctgataatatgtaaatgtttcgtaagatattggagttaattacatgctggtcataaccatttaactctcctgtattgatttttataagtattacatccaggatttttaacatatcatcatgggatttttgatacaaaaactcattcacagctagaagattatgtatgttttcataaatatttatgttattagttctgccttctaacaaaggaagcaaaccatttattattttctttaactggtttgaactccacggaacacatcctaatataatcaataaattattggtccatcgatctattgaagtggtatgaataaaatttttatttttcaacctaatcaggttgcatatgttttcgagagagttgagtaaatatttcttaatatggtgaacttctcttttgtcaagtttgctggtgctgattattattttgtcttttattaccttacttaaaaattttttgagtttttctgtctcgcagtattttattaacataaatagatcgattctattaacatagaatatctcttcgcatagatagtgttcgaggctactaagaatattaaattcgaaaaattgtttaacctctttatattcttcaattaaaatttcgttgcctaaaatgaaatacacataagggtacagtttcgctcttgttttaaattcatcattggaaaatgctattccaccactctttcttatttgtgagtaccctaaattcttcttcgattcaacgtcaaatcgatagtaagctttgtatatttcattaaattcaagcatctttactaattcttgtagctcactttgcaccccccgtggaaaatcaattattttacttttaaactcaaatggagtatggctttccattattgatttacaatcttcatcaatgtccttaccgttacagtgtaaatccgacttcaacatcctgtaagcataatcaaaattagacatgtgaatggtggcgagaatatagtttctctcattaagatgaagctttactttcgaaataagaatatcgagaagtttgccatattccttgttaataagaagtatttcagcattatcctttgaataagcgaaagaaatcttattgtatagctcagactctaattctgaagaactaatcacctcatacagtttcgagtcataactaactgtatttataaatgccttttccaaaatagatgagaatgtcttttttaagtgagtatttttactcaaaatgtcattaaggtatatgctatttattttcctgctatactcgtcataatcagtcgtcaaaatattattgtgggaggttagtttaaccccagacttatcataatcaatggtactattagttaattttttactgatctgctcagggagcaatactttgtattgtgttaatgcttttagtttgctatcaacatatttatttattttttttgttacaatacattgaatatcattcttcaatttatttttatcaaaatcagacattctcaggtcatcttctattttttttacctttgactcagtatagatcagggtcctctttataaactcatcttggtttttaacaagcttgaaatcactgaaaaattttgaataaagatcatgatagctaatgtcagtattcatcggtgtcaacaaggatatcccatgatttcttaagtaaagagcctgggctgcatcatgatttttctggagcaaatattttcttggtgttgcttttgatatagttgtaacccatgaaacaatctgttttaaatcataatcactataagagtatcctaaaaacacaacagtgtttgttgagaatattccttttataaaattttcgataagtggaaaattttggctgtactgtaagtaatcatcctctttaaaaacaaaattattctgtcgaaaatccccatgcatctttataattttcttgtccaaatgactttgtgccaggtccacgtcagaactaactaaatcataagccaatcctatgtcttgtgcagttttttcaagcaaactatcccagttggttgtaattatatagtgggggtttaattcaaatagcatcttatgaaaaagacttggtttcaaatctctaattattgatttgacttttttaacataagagttttgtccgtattgaagaaagtaaagttgggctatttttaaataatcattttcttcagacaatcctaagtcgtcttttagctcatttattaactccctccaggttggtatttttattaattccgtttcgctgaatttagaaaaaccagcaccaataaaaagaactaacttattatcttgactggcattcaatatttcgttcaagtcatattcagaaaaagaaagtggatttaaatttatcattttataactctatgcatgtcttaaaattcattgcttccatcaatattagcataattaagtatttcaaatcataacgatgcttaatttatcattataatccattaacttgttccaagtacaccgtctgctagtaatttctccattaactgacttataaagtgggggacttccgtctctctctcataacagacattcactacagttatggcagaaaggtatgcaagccgggtgtgggaaagtatgaaagaaaagaagactgctgcgccgtttgtcgtcacatttatcttcattggctatgcaagtcgtaatacaaggtgggacaaaactgagacacataaggcctcgcaatggcttgcaaggctttacatgttttgatgtggcgggacgtgtgagcgcagtgttgatggggtaatgctttgaattagaatcggattcttataattcgtaatgcgaaggtcgtaggttcgactcctattatcggcaccatttaaatcaagtagttaccccatatttaaatacaccacgtttcctcctgtgccgtatttgtgccattgtaaccctggcaattcatcaaaatactgttctgacatcaggcaatgcaggtgcagacatttaagccaattgctgccgccattccttgacgtggtcaatcagggcgcggagctttggtgcaatattgcgacgctgtgggaaatacagatagaagcctggaaattgtggaagaaagtcatcaagcagcgatacaagcttaccgctttcaatatatggcctgaaagtttcctgagtggcaattgttattcctccgccggcaagagccagcctcaacatcagacgcagatcattagtcgtaatctgcggttcaatcgcaaggtcgaaagttctcccgttttcttcaaatggccagcgataaggcgcaacctccggggactgacgccagccgatacacttatgggtatttcccccggaggcgagaaagcgctctccacgcccggccgcaaggatcaggacgacgggggcaggcatgaatcctcctcctgatggagacgtacagaggcgacttctgccagcacggagagtgccagagtatgcgcatcccgggctttggggaatatcccgacgggtgcccggatttgcgttgtttcctccctggaccatcccagctcgtggagcttttgcagacgtaacgtgtgggttcgatagctgcccaatgcgccgagataaaagggttttgcttctcgcgcggcctgcaacactggcagctcccggttgagatcatggcacagcaaaatgaccgccgtatcggtatcgatctgagcgctggctgaggccggaaaaagatcgaagatatggctgtcatagcctgtggctgctgcaagactcgcggttgcctgcgcctcaagagaacgtccgtaaatcatcagcctgacgcatggcctgaaccccacctcaaagccattgagattccagcccgttcgggtttgcgtgggcaggcacaccaacgattgtgcttgcggatcgtagcgcagccccgccggttttctctgttccaggcggttcagcacggcgagcagaggctgtgccgagcgtagtttatggagcgtcagcgtgatcccaccgccgcagggcagaacgatgtcaaaccacggcgaaccttcgccatagcgaatttcgcgatcgcagtctgagcccatcatctccagcgcttcaaaagcggcagcggcctccacgcagccgccagagacaaaaccgcagtaacgaccatcttcgcgcaccaccatctgcgccccgagcgggcgcgccgcgccgccgcgtatctccaccagcgtcaccagcaccgctcctttaccggacattagcgcctctacggcgaagcgcagaatggtccggtggtcatcggtgagaaacgcctgctctggcttatgccagtgttcgtctttatcaaaaagcgggtatgacattgttcctccttaaaccacatccggcagcttatcgagcagcttatccagagtgatgggataatcgcgtacccgaataccggtggcgttatacaccgcgttggcgatagcagcgctcacgccgcacaggcccagctcaccgacacctttggccttcatcggggaggatatggggtcggtatcatccaggaaaatcacctcctgttttgggatatccgcatggaccggcacctcataccccgccatatcgtgattaacgaagtagcccaaacggtcatccaccgccagctcctccatcagtgccgcgcccatgcccatagtcattgcgccaatgacctggctgcgtgcagttttcggattcaggatgcgtcctgcagcacacacagcgagcatatgccggacccgaacttctcccgtcgcgctatgcacgccgacctccacaaaatgcccggcaaaggtcgactgctggtactccttgctcagtgttccgaattcaatgctctcttccgctgtcagtctgccgcctgcggtggcctcatgtagcgtggcgcttcgggtaccgttggtaatcttgccgtcggcaaactgcgactgctcaggatcaaacccgactgccgaggcaatcatttcgcgaagcttcacacaggcggcgtaaacgccggaggtggaggtattcgcgccccattgtccgccagaacccgcagaaaccgggaaactggagtcgccaaggtgaaccgcaacctgctccagcggtacgccaagcatttccgccgccgtctgggccagaatggtgtagctgccggtgccaatgtcggtcatgtccgtttccacggtaacggtgccgttttgttcgaggtgaacccgagcccccgatttttccagcagattattgcgaaagcccgccgcgacgccgtggccgactagccactctccgtcgcgtacctgtccgggtgtggcgttgcgctgcttccagccaaatttatccgctccggtgcgcaagcactcgataagctgacggcgagagaagcggcgcgtcgggtcggcggggtcaacctgagtgtcattcaggatgcgaaactcgacgggatcgatgcccgctttttccgccagttcgtcgatcgcgatttcgagcgccatcagaccgggggcttcgccgggcgcacgcatggcgttcccttccggcaaatcaagcgtggcgagccgcaggccggtatgacggtttgccccggcgtagagtaattcgctttgctgtaccgccgtttccggcgtgccgccgggcaggtttccggaccagctttcatgtgagatagcggtgattttcccgctctggtcggcaccgatacgcaggtgctgaagggtggcggggcggtgcgtggtgttattgggaatagtggggcgggggagcatcactttaaccggacgtttcaccgctcgggcggcgagggccgccagcagcgcatcgcttctcaggaacagcttgccgccaaaccctccgccgatatacggggagataatacgcacattctccacgggcacttttagcgtttttgccagatcggtgcggcaccagtcaatcatctgatttgaggtccagagagtaagcttatttccatcccagacggccatcgaggcatgcggctccatcgccatatggctctggtccggggtcgtgtaggtagcatcaatcttcaccgcagcggaggtgaaagctccgtcaaagtcaccgacgtttttgtcgggcgtgtcttccggcggctgactgacggcctgtttttcgtccgccagggagtaagctcctttattacggcgatagtgcgcctgcaccagcgaggccgccgctcgcgcctgttcgaaggtctcggccactaccagcgcaatggcctgatgatagtgctcaatagtgggaccgcctaacagcctggcggtgtttttgtcgcctttgccgagtgccccggcgttactggcggtaatgacagccagtacgcccggcgctttttgcgcggcgtccgtatcaagggcggtgaggcgtcctttggccatggcggaaccgacgatatagccataggcggcgttgggggcttcttcatgccattcgtaggcgtagcgtgccgtgccggtagttttcagcggtccgtcgatgcggtcatggggacgaccgacaaccttcagctgatcgatcgggttttcccctgcgggtttatcaaatttcatgcttgtgccctcgcttcagccagtacggaggcaagcgttcgcttcgccaacaggagtttaaaggtgttttcagcggtgggatgggcgctggcgaacagcgcgtcatatacggcctgcgccccctgggatagctgagcatccgcagcctcaatgcgccagggcttatgtgctactccgcccagcgcgacgcgcccgctgccgtcaggctgaataatcgccgcgaccgataccagggcaaaggcgtaggaggcgcgatcgcgcaccttacggtagatatgttttccgccgagcggcggaggtaacgtcaccgcaacgataagctcaccgggaagcagggcggtttcaatgtgcggcgttttccccggtgggtgataaaaatcagccagtgtgatactgcgagtctttccctccggcgtgatggtttccaccaccgcatccagcaaccgcattgcgaccgccatatcgctcggatgggtggcaatgcaggcttcgcttacgcctaccaccgcgtgctgacggctaaagccttcaagcgccgcgcagccgctcccgggcaggcgcttattgcagggctgattggtgtcgtaaaaataggggcagcgcgtgcgctggagcagattacctgcggtggttgcctgattacgtaactgaccagacgcgccagcgagcagggcgcgggagagtaccgcgtaatcacgacgcacgcgctcgtgagccgccaggtcggtgttccgtaccagtgcgccgatgcgcagcccacccgcgtcggtcacttcaatcttatcgagcccgaggccgttcacatcgataaggtgggtgggcgtttcaatttccagcttcatcaggtccagcagattggtcccgcccgcgataaattttgcgccgggtacgcgctgagcgctaagtgccgcctcggctggggtgttcactcgttcataggtaaacgccttcatgattttatctcccccgcagcatcttcaatggcggcaaggatgttggcgtatgcaccacagcgacagatgttgccgctcatacgttcacggatctcatcggcagttgtttctggagcggaaaccaaatcgaccgtgacgtgacttggaatgccgtcctgaatctcttttagcgccgctactgatgagcaaatttgcccggaggtgcagtagccgcactggaagccatcatgcttgataaaggccgcctgcatggggtgaagattatctggcgaacccaggccttcaatggtggtgatctcggccccctgatgcatgactgcaagcgtcaggcaggcattaagcctgcgaccattgaccagcacggtacaggctccgcactgtccgtgatcgcaacctttcttggtaccgatcaaatgcagattttcacgcaaagtgtccagtagcgtggttcgggtatccacctcaagctgctcggttttgccgttcaccttcagtgtcaggggcattatctctggcgcgggtgtagctgccggaacgcttgccgccagcgtagaatgaggataaaccacggcggtcgccgctgttgcggcgctcactttaatcagatcgcgacgggtcaaacttaaatcgtgcggctcgtgcttcccaacccgattatcttcggggtattcgccttggttgctcataccaggcctccggtattctaaaggggaaaataagagtgcgttgcgagagtgctgatgcttttttaaacgttaagcatagtcggcgacagcaggaggattattcttaaaacgcgaatgcagctatgagcccggctaataaattcatgttcgccgggatgttgatgatgatgggagctggtttattgctttagttgtacgatgcaaaaaccaataaggaaacctgtgattttcagctctgcatcaccctgcaaatctctgtcacttctaatataaaaatagggagaaatgatggagcttatattcattggcgattaggaaactatcttgttatacaaaacaatacagttctttacatttgccttgttttatgaatactcctgaagaggtgtataacataatggtacaagcagggtagatatgaatatatttgaacaaactccaccgaaccgcagacgttatggtcttgctgcattcattgggctgattgctggcgttgtttccgcattcgtgaagtggggggctgaagttccattgccgccacgtagcccggtggatatgtttaatgcagcgtgtggcccggaatcattaatcagggctgcaggccaaattgattgccgcgtaattttctcaatccaccgtatatttttcttcgagactggttggggctgacagatcccaatgcggctgtttatacctttgccgggcatgtctttaactgggttggtgttacgcacattatcttttcgatagtgtttgctgtcggttattgtgtggtcgctgaagtatttccaaaaattaaactctggcagggcttactggcaggtgctttagcccaactttttgttcatatgatttcattccctctcatgggactgacgccacctctgtttgatctcccgtggtatgagaatctttctgaaatttttggacatttagtctggttctggtctattgaaattattcgcagagatttacgaaacagaattactcatgagccagaccctgagatccctttaggctcaaacagataatgcattgaatgataaaaatggcgcaaatacagcgccatttttataggttaaaaacattgctttttatattctgattcagatagtcagtgagtatatcgcgctacttcaggatgatgtagatccgaagaacgctacagaagagaggcattgttgctggcaaatagaagaagtatcgggttttgttacccctgaaaaacgaagccccgctattatcgctggcggggcagtgcaattaattattgtatgtttataacggtgtcagcccgtatttagcccttgcacgattgcaagcctcattgacgactccgttctcaccagacatggcgaattctctgcatgtggacgatcgatttttatatatcgtgcagcaggcatttttgcccggggttcctgcaagggcaatacatcgggggtttttctgattggtaccgctcatgcatcggtgaaaaggggatatttgttcagtgagcctggcgggaatagtaccgccagcatcgtcggcttcggcccagtaaaaagagacgcggaaaaatgcacaacaggcaccacacgtcatgcatggattcagattgctcataattcaccagtacagctaaaaatcgtaaagagaacagcggtacatcgtatgtaagaacgtaccgtggttggctggggaactttcgatagtgtgagtattgaatgatttccagccgttaccgattttacgtactaattcgtgattaaaccactcgttagcaggctgcctgatacctttccgtgtctcctgaacactatggtgtgcatatgagaaagcccatcgttacaggtgatattgacgatcgcttccacatcatttaaacgatttttggggctctgaggtggaattcttccctcgaccgatggataagtcttagtccgccgaagggggcttagccggacaggaatcgctaatcttaatgaatttgtcgttatagaccagatagtgattccccggctgacgtaactcaggctgatgaaccacgtctcccggacgtagataccaggcatcgccttcctcttcggtcgaatcacatcctggcttaatcagtagcttaaaccatgtgttgccagtgttacttaccgttcctgtcaccttgtcgaaggaccatttaaactgaacctgacgtggtcgtactaccagaatggtatccatcaccaccaccggctccgtgctgacctcgccgccggttgggctacgtcttgtctggttacgagtggggacttcgcgaaatgagacccggtagtagcgctcgcggttatcctgtggaccatgatagtaaaatttaaaatactcgctctcaccagcctgcaacgccagctggcggggggcgaaaagcagctcaccatccaccggtcgggtgcgcaattcactgctgcccgggctatcaatagcactgatggcaatacggtatatccgtgcgcttttgttgttattcactacacgtttgctgacaaagtcagtctcggacggcagcgaaaatgtcagattgccgaccgaaatcgcctgtgtcaaaggtgccgccagcatacagaccgctgtcagcagggccttagttaatgttacgccacgtcgcctgaacatgaatctctcctgaagcgctgacttcgccaaaccagccgttatcatctaccgtacgcagcgaaatggcgttatccattggaatcgaaaatttgactgtggtcttatccatctgccccacttcgccagagatatcagtccacggtgtggtcaaccacagcgcatcggtcatatcccgccagctatcatcgcacccggcatcgtaggtttttgtagctccgttgcgggtaataaaggaaagtgtcgccgggaacggtactttcgccttaccgtcatcggagctgaagacacaataggagcgcccgccaatcacctgcgcgggtccggtcaccttgatcagcacttcgtcggcagctgttttaccgctggtggttacgatataaccgaaatcgagtgccgactcgccgctgccaacatatccctcccgcgacggtgtctgagtatattcatcggagataatactgatgctgaaatcacggggtttgataatcagcgtgttggaggtagaaaattcataccagccagactccggtgatgtggtgttctgaaagcgaaagttgaatagatctttggtgttgatatcgctgattccctggttcaccatctgcttaaagaagttgctcgagaagaaaacatagatcgagtctgcgctcttcatctcgttgaaggtgtagtaataggcagtattgctcaccggtttccatgaactgccattcagactgaactgcatatcgtacgccccgacggccgaggctaacgacgagttggcgatcgccgggaatatatggattgaggtgttgctgagtccgtttgtttgcagggtatagttaaccatcttacaacttaatcctgaacggctgccgatggtttgcgtccggcagtcggcgttcccttcgcccagagtcggtactccgtcgctgttgataaatacttccgccagcgagtgggtatttatcaaccgtagatttgctgctttcgtatgggtgacgttgcgaacataccagttgccggaggcctgatccttacagcgtgcgccgctgctggcgtcatagttcacagaggtctggcaggcattgatggtcattgtaaagctgctgccgacgggcatttgttgcagatactggtaaaacgcgtctgacaacatgccgtgcatccacttcgcgccgccgctggtcaccgtcgcgccataaaatccactggcgtcggtggtttgcggcaggataagactggtggtcatattacacccagcgtaccagttgatgcagcgcaagccagttaaaggagatgaaactggtgaattttccagccacatatcaaacttccagttggtataaaggccggtgttgtaaccgttatcaatgtagccgaggctttgctgatagatggttcctgaaccagtgtattttaaaccggtccagcggttggcaccggtcaggcgcggatccagcgccccgccaggagtgacgaaaaagttgtcgtctgagttgttttcgacaaacacaaactcgcgtgccggtgcatccgcccaggttgttttgctcactgccgctctgagcgcagttactggccagattagcgcgaaaattatcatcgttattagtaggttaactctcattctcttctcctgtctgcgtcaccgccgcccacgatgagaggccgctgcagaccacatcaccgacccagacggcaccgcgcgcctggttgagttccagagccacttcgcaggttttattgccactgtagcgaaaatcgatagtggggtatttcttatccacgtccatgacaaactcgccgttttcatcggttcgggttcggccgatatggttgttaatccgtgcgttagccagcagtgtgccgtcttccgcacggatacgaccggagacggtaaccatctgcttcacctctggctcaatgacagcgacattgcctggatagagagtcagacgacttttgcggccgctgacgatatcgtaactgtcgagtgagtttttgctgttctgtaactccacctcatatcttccatagggagagagcgggagatagttacgcttgccgttaagcgggaaaatccgcccgttgattttggcgctgatctgaccgtcgtcctccagcccggtgttgaatatcaccccagcgttgccatcagtccgcccgctggcagcaatgtttttaccctgccagccgacgctgccattggcggtcaagttggtattgacgtagccgtccgccgcgctattgacgttcagcgttccgctggcgtaacgagcgtcgaattgtgcatacgccccgccgctgagggttttgtcatcaccggtatcgccggagatggcacgtgacagattggcaccaacagtgcgaatggttccttcatcaaactgtttgcgtgctgacaggtttgccatggtgtagccgttttgatgagtcatccctgcgctaaaccagttgcccagtggtagcgagagatcgagagcgatatattttcctgtattggcgttgctgtcgccgttgttatagcgctgaataccggcccgcaggccaagcgaaccaaaggtaccgctgtagacattttgatagtaatctgccgtgtaataatggctgttgtaacggcggtcatcattgtagctgatgctgaatgtgcccagcttcgaccacagtgagttcaggttgagtgtgccgccgattgcacggttgtcggcatcgctacgtcgcaattgattgccaatgcgggttttttcctgattaacccacagcgaactaaagcctcccggtagagtggcgctgatgctgccgatgctgctccatgagctgtcactggccagcatattttgcaggttaacgttgatcgcccccccaagcggcagcgtcagacgggtttcacccaccgcctgattatcgtatccatatcccgttgccgcccagctaagcgtactcaatgagccggaggtcgaggcacctgctagccaactctctttagctggtcgcgtctttttcccgttttccgaccagcgatccatatgaaagctaccgccccatacctgccacgccagtggtgcaccgacgccgcgcccccggctaaacagcttattgacccgctgggtgcgtttgctgatcacgcgaccgttaacgatcacctcaacttccacatcgtaaatcccgtacggtagaccccgggtatccacttcatgattgcccatagtgaagttctgaacgcttagtagccgcccatcacgggtgagatgtacttcgcccgccgccggtaaaaaggcgatcactggcgtggctgactggctgctgtcgaagatggtggagctggcctggtttccccaggaaaggccgtaaatcttccctgctgaaatggcggtcatcggccctaaggactgcaagttccaggtgtcgagcattccaccggcaaatcggtgaccggcaaaatcgcgttcatacatcgctttatataattcactgtcctgttgaccgctaccgatcccgtacagcgagccgtcgagcaccacatgatgttcgcgcagtgcagtaacgttattcagcgacagatagctggatgtgttgctcccgccgttacgcaactggttgttatagacgcccaagttatagctcagattactgctgagggtgttaacactggactgcccgatgtcttcgctacgtgagcgtagtacggtgcccagcgcttcgcgcttgaccactagctgcagcagcagttggcgcaagctgagatccagctgcgcgttgtcagtcagggggatggtaagggcctcattgaacggggcgttggccagagccatcagctgctgtcgagtttgttcgctgacactggcgttatcttcactctcttccagctgtattttccggatgcgtagctgtccatcgtccagccagataaaagcgctgccgattcgctgatcgtcctggcgaccctggctaccggcgagatgaatatagagcgggacgctcatgccgtcctgaagcgcctgactgaaggcctgcggaataatcaccccacctatttgctgcgcacttatgtcagcagcgctggcatcgggctgaacgaacaaaaagaccatgccgaaggcaaactgggctttcagtcctggggagaaccgtcgtaaaggcattgtcgttatccatctgcacagctatctatttcacgggaatgaacttatcaccctgccaaagtgcaacccgtcctttgttatccgcagtgtccacgcgggtaaaacgacgcgacttgcccggcatcaggtagtaattctctttacactccttaccgttggcggctttcaggcaaggtccgtaggcgaggatccgcagcgtcgcatttcctgtatttgtcagggagccgttggcgtactgaaagtggtagttcgcctgacgaggggcgacgaccagaatggtgccgatgcgggcggaagcagtggccacagcgctgcggttggcattatcgcgctgcgcatcactgagggcctgatcaaaccagacaatgcggtagtagcgctctttttcatctgcgggtcccttatagaagaagcggatcacttcgctggcttgggcgggtagcagcaagctggcgggagtgagtagcaactcatccggcttgtccattgcgataacctgcccgtcgtcaagcggtgaagagagccgttcgagacggatattgataaggcgaccactgtcggtactgtttttgatcgttttgctcagcgtgctgctgtcactgttcataaacgatgatatatcgccgacatccagcgcctgggccggagatattccggataacagcagagcgagaagcagaaggtgctttttcataacaattccgtccaggaataaagcaggggggctacccctgctggtacatcagagagattaactggtccaggtcgcgtcgaactgtacgctaacgtcgccgctccagatgccttccggtagagtgctgtaatctgttactgcggtggtaccattggtggtaccgctgatgatggagaaggtgaaaccatcctgtgcggtggtacgattgctggcattgtaaccgttagccagcgggctaaggttgccgcccagtacgccgttggcggtatcgatcatcacggtatcgccagttttttcgactgccgcgccgttataatccacgcccacattcagtgtggaacctgaggtatccaactgggttaatgtgttggtgataagacgtgaggtcagtttaaaggcggtagccgttgagtcaccctcgatagccacgtcaaatagacctttctgtgagttaaaacctttaatgccttcggcatactggaacgccaggctaccgagtggcgtcacaaccagcttactggtggtgtcttttttggctgttgccgaccaggtcgctacagcctgagctgttacgtcagcagcctgcgccacacccatgccggtaaacaccgttaccagagctattgccagaaccttttttttcattgcatttcttcccgagttgaattgaggacgtgatgtcccagtgagtcattttttaaaactaacttgcctggagtttactgaaccaacttatatatttttgagtacagcttggcctcagcattacgccgatgggtatacactgtcttcacactacaattttcaattctggcaatcgatttaggttgcattccctgggccgtcatgcggataatttccatttcccggtccgtgattttatctttcttaatatcttttctcaggaacctgccattaatcacatagaccagttcttttctaatatcacgactcagtccagcgtataccacgcccctaatattgctattgtaataccaataatttgctaaggcctctgactttctggccgcaatcaatacgacctgtttcccctttaccgcggataaccattcattatcacagtttataaattcagataaagaatccgtactgagattgataaacacgaaatcttttctaattttctccaacgatagataaattaatctgtcgatatccacaatcagttcagatagtcctttatagaagtaggcgtcatggggagaccagatgtatttatcagaacggttttgacattccatatggtttttaacctcatagtccctactgtaatcactttgccatgtcactactttccaaacctgtaatttttacaggtgcattcagtttccttagtaaaccggaagtaaataagatacgtagtacatatcaataaaggttaaacgagattaagtttaattattttcgattgggcttaaatttatgttttttttcccgatgagtgtcaatatgtgaacggaaaaggaattcaatggttaagtcaatatttagaaaaactgaaaatattgcttttttgataagaagaaaaagacatttggtttcataaggttattggcaatataacgttcaattcttacttgcattttatattggtcaggaactttgccctgaagtgttaggaatagtcttaatgcgctgtgtgatggactagtaaaaaaacaagttttaagggtaagggatagaatataaaactatgatgagctgtcattgaagatgatttgccaatcagtaagatattttaatggattaacatgccgcacaaaatggttacaggtgttcattccaataagtaatggaaaattgaacgggcgtatgtacgtcatctgttcggtaagcccccaagagccagattaagtgaagttaaacgaaggctgccagctgtcacaggaacgatggcctttttgtcagggcactgcattcagttatctgtgcgcgttactctaactggcactcgaacgtcggcgacggggttaccggtggatcagactgttcctgtggcgtaaacgtttttatgttagtaccaacagatttaccacatttatcatcttaacagtttgagtgaaaatgcaggctgcgccgcaaagggaggagactgagtggcgtgttcagtctaaaagagggttgatgccagcatacaggggcgaagctggtcaacaagtcaacattaagataatggaatattcggagagaaacgtcaggcagttggcctcaaatgaacaggaagaatatatccccaggaaaattaatgttggtgttataaacacaccaacattaatccgatctgattattaatcagacaaatatcgttaatccgtcgaattttgaatcaacgttttttcttacgaccctgaacggccttaaaacgtggattagatttacaaatcacatatagccgtccttttcgcttcacaatctgacagtctggatggcgttcttttgcggtacgcagagagttaagaactttcatcacgccccctttttcgtgctaacaaaacgaccaaaacgttgggtgaatcgtgcaacatttccttctgatgccactgttctcagcttccctgtatagaacgggtgcgatttagaagagacatcaattgtcacgtatggatacgttacgccatccagctcaatctcacggtctgttttgatagtcgagccgattttaaagtactcatcaacactggtgtcgtggaacaccacagtacgatactcaggatggatattgggcttcatcatttttacctgttatgttataacataaccataaagatacatgctcatccggatcatttcaacactcaatccctgtgactctttgtggatgtggaattttcgcaacggggaactctggcattgttagcagccattggtgacgctcccataaacgcctggatgagtgattgatgatggttttgctgagagtatggatttttcgagaatggaggttatctccactttactggccgatgatttatcgcagtatgattgattacctgacagcgtgtattcctctcccacggatataataattacttacaaaaaagggagaggatgcatattttaaatatcactgaagtgaacagtttatttccgttattaatagaaatggagaaataaataggcgtattctacaattgcgacaaaaacaacgatattaatcagtttatgactgatttgctgtactttattctctttcattggtacttcctcgctttaaaaaagagtgcacttcgtaagtgcccttatataaataacgagtttggtcaaccaattttttgacatgtatcacaaatttgaatagatgtattacatcaactatcttttattgcaccaacgtcattgatatatgtcgcctgaagtcagttccgggaatgagtctgatctcaagactggcccagtccgggcgttgattggtgctgaggagcatatcgcatctcatcataatgtcgtatctcctggggtgttatacaagatatcgttgttggtgacctgggagaggaattgagttctattaaaccgtcaactatgccggatacatactggattacactgcaggcacgccttatgagagaacgtgccgcagtgacgggttaattatctgaaagaatttgtgaggctgtatcggttactcattgatttgatagttttactctcgggagaataatagatatttaatccattaacggaaaccagccagttcctttcgatgcctgaatttgatcccatagtttatccggaatggttaattcatgaacaagttgtgttatcgttcatgagaagcataacgtaaagggaaaagctcgattagacggcagaatttgtcaggggttatgaacgaaattcataaatctgtttgagtgttgcgatgggtagtgcaagttcgatatctccgcaatttacagtccgatgaaggaaaatgaatatccataaaaaatatattggtttatcctggcatatatacctatttcgacgtatttccaatagttttaattaaaggcaggtcattgttattcactctgaatagtgaattattcactgtccgcagagtaagaaatataacttaggtatctatttaatgacttgcacaaaaagctaaattttcccccataaataaaaatataatcccgcgcccaaccacctgatgagtggctacaggcactggatatattaggtggcggtgcactttcttacataaaggtatttccttttctgcggaaaaggaaatcgggaaatccccggtttttctgacaagcagacgccattatttgtgtctgcctatgttcgttaattcgttcatcaggaaattatctcaatgtcacattataaaacaggtcataaacaaccacgatttcgttattcagttctggcccgctgcgtggcgtgggcaaatatctctgttcaggttctttttccactcgctgtcacctttaccccagtaatggcggcacgtgcgcagcatgcggttcagccacggttgagcatgggaaatactacggtaactgctgataataacgtggagaaaaatgtcgcgtcgtttgccgcaaatgccgggacatttttaagcagtcagccagatagcgatgcgacacgtaactttattaccggaatggccacagctaaagctaaccaggaaatacaggagtggctcgggaaatatggtactgcgcgcgtcaaactgaatgtcgataaagatttctcgctgaaggattcttcgctggaaatgctttatccgatttatgatacgccaacaaatatgttgttcactcagggagcaatacatcgtaccgacgatcgtactcagtcaaatattggttttggctggcgtcatttttcaggaaatgactggatggcgggggtgaacacctttatcgaccatgatttatcccgtagtcatacccgcattggtgttggtgcggaatactggcgcgattatctgaaactgagcgccaatggttatatccgggcttctggctggaaaaaatcgccggatgttgaggattatcaggaacgcccggcgaatggctgggatattcgtgctgagggctatttacccgcctggccgcagcttggcgcaagcctgatgtatgaacagtattatggcgatgaagtcgggctgtttggtaaagataagcgccagaaagacccgcatgctatttctgccgaggtgacctatacgccagtgcctcttctgacactgagcgccgggcataagcagggcaagagtggtgagaatgacactcgctttggcctggaagttaattatcggattggcgaacctctggcgaaacaactcgatacagacagcattcgcgagcgtcgggtactggcaggcagccgctatgacctggttgagcgtaataacaacatcgttcttgagtaccgcaaatctgaagtgatccgtattgctctgcctgaacgtattgaaggtaagggtggtcagacactttccctggggcttgtggtcagcaaagcaactcacggactgaaaaatgtgcagtgggaagcgccgtcattactggctgagggtggcaaaattaccggtcagggtagtcagtggcaagtaacgctcccggcttatcgtccaggcaaagacaattattatgcgatttctgcggttgcctacgataacaaaggcaatgcctcaaaacgcgtgcagacagaggtggtcattaccggagcaggtatgagcgccgatcgcacggcgttaacgcttgacggtcagagccgtattcaaatgcttgctaacggtaatgagcaaagaccgctggtgctgtctctgcgcgacgccgaggggcagccagtcacgggcatgaaagatcagatcaagactgaactagccttcaaaccggctggaaatattgtgactcgttccctgaaggccactaaatcacaggcaaagccaacactgggtgagttcaccgaaactgaagcaggggtgtatcagtctgtctttactaccggaacgcagtcaggtgaggcaacgattactgttagcgttgatggcatgagcaaaaccgtcactgcagaactgcgggccacgatgatggatgtggcaaactccaccctgagcgctaacgagccgtcaggtgatgtggttgctgatggtcagcaagcctatacgttgacgttgactgcggtggactccgagggtaatccggtgacgggagaagccagccgcttgcgatttgttccgcaagacactaatggtgtaaccgttggtgccatttcggaaataaaaccaggcgtttacagcgccacggtttcttcgacccgtgccggaaacgttgttgtgcgtgctttcagcgagcagtatcagctgggcacattacaacaaacgctgaagtttgttgccggtccgcttgatgcagcacattcgtccatcaccctgaatcctgataaaccggtggttggcggtacagttacggcaatctggacggcaaaagatgcctataacaaccctgtgaccagcctcacgccggaagcgccgtcattagcgggtgccgctgctgtaggttctacggcatctggctggacaaataatggtgatgggacgtggactgcgcagattactctcggctctacggcgggtgaattagaagttatgccgaagctaaatggacaggatgcggcagcaaatgcggcaaaagtaaccgtggtggctgatgcgttatcttcaaaccagtcgaaagtctctgtcgcagaagatcacgtaaaagccggcgaaagcacaaccgtgacgcttattgcaaaagatgcacatggcaacactatcagtggtctttcgttgtcggcaagtttgacggggaccgcctctgaaggggcgaccgtttccagttggaccgaaaaatgtgactgttcctatgttgctacgttaactacaggcggaaagacgggcgagcttcgtgtcatgccgctcttcaacggccagccagcagccaccgaagccgcgcaggtgacggtcatcgccggagagatgtcatcagcgaactctacgcttgttgcggacaataaggctccgaccgtcaaaatgacgacggaactcaccttcaccgtgaaggatgcgtacgggaacccggtcaccgggctgaagccagatgcaccagtgtttagcggtgccgccagcacggggagtgagcgtccttcagcaggaaactggacagagaaaggtaatggggtctacgtggcgaccttaacgctgggatctgccgcgggtcagttgtctgtgatgccgcgagtgaacggccaaaatgccgttgctcagccactggtgctgaacgttgcaggtgacgcatctaaggctgagattcgtgatatgacagtgaaggttaataaccaactggctaatggacagtctgctaaccagataaccctgaccgtcgtggacagctatggtaacccgttgcaggggcaagaagttacgctgactttaccgcagggtgtgaccagcaagacggggaatacagtaacaaccaatgcggcaggaaaagtggacattgagcttatgtcaacggttgcgggggaacacagcatcacggcctcagtgaataatgctcagaagacggttacggtgaaattcaaggcggatttcagtaccggtcaggcgaccctggaggttgatggcagcacgccaaaagtggcaaacgacaatgatgcctttacgctgacggcaacggttaaggatcaatacggcaaccttctgcctggcgctgtggtcgtctttaatctgcctcggggcgtcaaaccgcttgcagacggtaatatcatggtgaacgccgacaaggagggtaaagcggaactgaaagtggtctccgtgactgccggaacgtatgagatcacggcgtcggcaggaaatgaccagccttcgaatgcgcagtctgtaacgtttgtggccgataagactacggcgaccatctccagtattgaggtgattggcaaccgtgcagtggcggatggcaaaaccaaacagacgtataaagttacggtgactgatgccaataacaacctgttgaaggatagcgacgtgacgctgactgccagctcggaaaatttagttctggatcctaaagggacggcgaaaactaatgagcaaggacaggctgttttcaccggctctaccactatcgcagcgacatatacactcacggcgaaagtggaacaggccaacggtcaggtatcgacgaaaactgctgaatctaaattcgtcgcggatgataaaaacgcggtgctcgccgcatctccagaacgtgtagattctctggtggcggacgggaagactactgcaacaatgacggttaccctgatggcgggagtcaatcccgtaggaggaagtatgtgggtcgacattgaggctccggaaggagtgacggagaaggattatcaattcctgccgtcgaaggctgaccatttctcaggtgggaaaatcacgcgtacatttagtaccagcaagccaggtgtctatacgttcacattcaacgcactgacgtatggcgggtacgaaatgacgcctgtgaaggtgacaattaacgccgttgctgcagagactgaaaatggcgaggaggagatgccataatttgaatagtatgaaagttacgatctaataaagaataatggtgttgaaatattcaacgccattattcactgaataccttgcctgatactgattaaatagtatcaggcaaggataaaactcaataagagatagtgaccaactaaaccggacgaacgggaataaaaatttcgcaaacaacatcattgccatccttttctacgaaatcttcattgtaataaaagcgctcaatatcgctgccgttcactctggctaaccccctggcaggtaactctatcagatagatgttacgcacccagtcaggataattttcccagtttccttcataacggaaagaggcataaagtcctcgggtcgttgtccactcttttggcatgtcagcatattcacataccgtaccagcaaaagtttcaaccgtgagcaaatcgaccgattttgttgacggttcaaacgtggaaacgaaatagatatccgtcttaaaattcttcatacatctggctaaatgatgacgtcgtagtttgacttcttcatccggtgatttattcgacacttcaatgtcatatttaaatgagttgccaaaaataggtgtctcaggaaagttgattaatctacactccgtcttttgctgttgacgtattaaaaaagaagggaagatacttgcgagatcccaataatcacggtggcggtattcacggggagagcagccgaataactttttaaattcgcggctgaatgactgctgtgaatcaaaatgcaaagagagtgcaatatcaagcatagatttcgcggtgagccggacaagaatggcggcacgacaaagccttcgtttgcgaatgtattctcccaaaggcacatgcatgaaatttcggaacagaagctggatgttgcgtctgctgtagccagatttctgtgcgatatcttcgattgaaatagggtgctcaagattgcactcaatccactccaggagctgctgtagaatcttctgcctgatcatctcattctccgttaattctttgtcatatcgcacattttcgttataccctgggccctaagtgtatcaaaaatagcaagggcgaaggcaaaagcactggtagcgtctgcttcgttgtccccgaaaatagagaggtttcagtcctacattattaatgaattttttgcataagtgatatcaaaatccacatactactttgaggttacgttttaacgtagactcattgttcatgcctaatggagggactgacagtggaattttccgtatagtctgcttcagagtattgcagatgcccatcaaaaatcgatttctcactgacagataaagaaatggcacaaattagttcgcttgatttgggttatgttggggagtcggtaaaacattttaatcctgaatttgttcgtggttgtcttgctgtaaaaatacatgattgatattaatcatgtattttacctaagacgacaaaaaccttttaacagggagtgatattgatcttcactctgtcatatctccggtaatatggcgtcaggcttcatcatcagaaagggggcctgacgcctgaaaaagtgaacaacagacagtgttcggattatcaatattcagtttttaacgttgaactggattcattactgcgttgtttaagaatttcccgcgccgaatctgccattatcatgactgcacctgccagcatcagagtatctttcaataccaggcgaccagcaccggataaataagggaaaccatgatgagcgtcacccaatgcgggtacccatgcctccggggtggtgattaaaaatgagagtgttaccagcggcgtggtaaatgccatcagtcctcccaataaacctaaccagcgattgacaggattagccaaaaccagcagagcaataatcacctccacgacgccaagaccgttggaaaaaccataggtattattggccgtttgccatgcccttgcttctggtttgtattcgccttcgtgagtcagatactgtttatagtcttccgggtgttcataaaagaacgacattagtggactgtttgcgacgaatggtgtaatgctgtctgcctcgtaagggacaaactttaataacccaatccacataaaaacaattgcaatactcagacgaatcaatgtcaggccaattttatctccccgacttaacaggtgcaggtatttttccattgtgaacatccttatttatacaatactgctgttgcggttgaattattatcaattcgcatcgatgtgactttccaggatgaagcattatattttctggctatatcagcaatggtatcctccagaactgtcggtgatgctgatactgacgagacgctgatatgtttcagaattattttatcatctgcattggtggaaaatgccataacgccagataatagtgttgcaaataaaacagattttttaaacatataaaataccatcaatgaagtgattaagaagttatagagtaacagagaattaataagattcttttctctgagacgccagaatatttgttctggcgtctgattttgagtttatttgactaatgaaaatagatcattgagtgattcgctcatcgacggatgagtaaatatctgatcgcgtaatatgctataaggcagcccggcatccatcaccattttcactatattgatcatctcgtgggagtcaacacacagcagtgatgcccctaacatacgttgggttttattatcaacaatcgcttttaataccccacgagtatcattcatcactctggcacgcggaattgcagctacaggcaatgtcaccacctgaatatcagcaccactctctctggcttgttcttctgtcataccaaccctggacaggggcggtgtcataaatacggaataaggcacatttttccgatcatcagtactacgtttgccttcacccagtaactcatcacgtacaatgcggtaatcatccagtgatatgtaagtaaattgcagcccgccggtaacatctcccatcgcccaaatattgtctgcggtggtatgtaatcgcttgtcaacgacaattgccccgcgctcgtttactgcgataccggcattttctggatgtaacgaagcggtagccggttgacgaccggaagctattaacagtgcatccaccgccagttgggcgtgctcgctatgcacttgcacttgattttcatggtgactgattcgctccacatgggcattgaggataatatcgacgccctgatcgcgtaaaatcgtcgcgatattatcagcaatatcccgatcttcccgaggcaaaaacagcgaagctgcttctaaaatggttaccttgctgccaaaattagcgaacatagaggcgaactcaacgccaatatatccgccgcccaaaatacctaaatgcccaggcaattcttttagattaagtaatccggtgctgtcatatactcctggcgtggtggtaattccaggaattggcggaaccacggtttgtgcaccggtattaataaaaattttctcgccatgaatttccagatttccctcaggccgatgaacacgcaggctatgattattgataaactccgcctggccgtcgatcacgtcgatattgggcatatccgcaagattatgaaaattcttattacgtaaaaaattaaccacttcatttttacgctgtatggcacggacaaaatctgtgtgctgctgtgcgtcatgaaccaatgttttggttgggatgcagccgatattaatacaggtcccgccatacattgcatttgattgttcgatgagagccactcgccaacctgcttttgccagcgtgacggctaatgtttttccagccttgccaaaaccaataatcactgcctgatatttattcatgatgatttcctgtcgaaacgcgttcatttgacatcatgactatagacgcaaaagagcaaataacatttcttcacaacgcttgatattttgtcttatcgtctgatattttctttttcttaatcagaatcacaaaacaaaaatcatgattaactatttgatggtattagattagttatttactaatattgttggtgtttgtaatcaaaaaccactcaggagtctgatatggatgcccttagccgtttgttgatgcttaacgctccacaaggaacgatcgataagaattgcgtgttaggaagtgactggcagcttccacatggtgccggggaattatcggttattcgttggcatgcgttaacgcaaggagcggcgaagctggaaatgccgacgggggagatttttacattacgcccgggaaatgtggtcctgctaccacaaaattcagctcatcgcctgagtcatgtcgataatgaatcgacctgtattgtctgcggcactcttcggttgcaacattcggcgcgttattttttaacgtctttgccggaaacgctgtttttagcaccggttaaccacagcgtggaatataactggctgagggaggcgatcccgtttttacaacaggaatccagatcggcaatgccgggagtggatgcactgtgtagccagatctgcgctacattctttaccctcgcggtgcgtgagtggattgcacaggttaatactgagaaaaacattctcagtttgcttctgcatccacgtcttggtgcggtaatacagcaaatgctggaaatgccaggacacgcctggaccgtcgaatcgctggccagcatcgctcacatgtcccgggcaagttttgcccagcttttccgtgatgtttccggaaccacgccgctggctgtattaacaaagttgcgtctacaaatagcggcccagatgttttcccgggaaacgctccctgttgtggtgatcgctgagtcagtaggctatgccagtgaatcatcttttcacaaggcgtttgtccgcgagtttggttgtaccccgggagaatatcgggaaagggtcagacagcttgcaccctgaataaaaccgccagaaatcagggcaaagataatccgcattccgggagttgtgagcctttcaactatttctatttccaacggtggtttgggctttatatattttttctgatggactctagctcagtttttaaataaaaatgcaaactaaattgcttcaattaaataaaatcccgactattacttgatacgtgattattgtcggtgatttttttgtacaccatcagtgtatatctcaataacccctgaataagtagctctgaataggtataagggatgtagccatttttaaatggatttcttatgccaaaaatgatcgtcgatttccccataaaatgtgagcgatgccgaaagaaataaaattagttattgcatttgacgtttggatgaaagattatcatttgtcatacaaatgaggggtggtatgttgctagccaattaaaaaagaacgccatatttattgatgattgatcccccggtgggggggaaacatcgggcataaatgggcatgaagtaatggagtattagttgtgaatgtcaatttctttgtcacctgtattggtgacgccctgaaatcaagaatggcacgagactccgtgctgctactggaaaaactcggctgtcgcgtaaatttcccggagaaacagggatgctgcggtcagcctgcgatcaatagcggttatatcaaagaagcgattccagggatgaaaaatctgatcgccgcactggaggataacgacgatcccattatttcaccggctggctcttgcacctatgccgtaaaaagttacccgacgtatctggcggatgaacctgaatgggcatcacgtgccgcaaaggttgccgcgcgtatgcaggatctcacctcttttattgttaataaattaggggtagtcgatgtaggtgccagtttgcaagggagagcggtgtatcacccatcttgtagcctggcccgtaagctgggagtgaaggacgagccacttacgctgctgaaaaatgtgcgtggactggagctgttgacctttgctgaacaggatacctgctgcggatttggcggcacgttctcggtcaaaatggccgaaatatccggcgagatggtgaaagaaaaggttgcgcacctgatggaagtccgccctgagtatttaattggtgctgacgtgagttgcctgctaaacatcagtgggcgattacaacgggaagggcagaaagtcaaagtgatgcatattgctgaagtgttgatgagccgctgaggatataaagatgtcgatcaaaaccagtaatacagattttaagacacgcatccgtcagcaaattgaagatccgatcatgcgcaaagcggtggcaaacgcgcagcagcgtattggggcaaatcggcaaaaaatggtcgatgaattggggcactgggaggagtggcgcgatcgggccgcccagatacgtgatcatgttctgagtaatctcgacgcttatctgtaccagctctcagaaaaagtgacgcaaaacggcggtcacgtctattttgcaagaaccaaagaagacgctacccgctacattttacaggttgcccaacgcaaaaatgcccggaaggtggtgaaatctaaatcgatggtgaccgaagagattggtgtcaatcatgtgttgcaggatgctggcattcaggtgattgaaaccgatctgggtgaatatattctccagctggatcaagatccgccatctcatgttgtggtcccggcaattcataaagatcgccatcagatccgtcgagtgctacacgaacgtctgggctatgaggggccggaaacgcctgaagcgatgaccttattcatccggcaaaaaatccgcgaagatttcctcagtgctgaaataggtattaccggctgtaatttcgcagtggcagagaccggttcggtatgcctggtgaccaatgaaggtaatgcgcgaatgtgtaccacgctgcctaaaacgcatattgcagtgatgggaatggagcgtattgcccccacgtttgccgaggtagatgtattgatcaccatgctggcgcgcagtgccgttggtgcacgtttgacgggatacaacacctggctgacaggaccgcgcgaagctgggcacgttgatggtcctgaagagtttcatctggttattgtcgataacgggcgttctgaggtgctggcctctgaatttcgggatgtgctgcgctgtattcgctgcggggcttgtatgaatacttgtccggcatatcgccatattggcggtcatggatatggctctatttatccagggccaattggtgcggtgatttctccgctacttggcggctataaagattttaaagatttaccctacgcctgctctttatgcacagcttgtgacaacgtgtgtccggtgcgtattccgctgtcaaaactgattttgcgtcatcgtcgggtgatggctgaaaaagggatcaccgcaaaagcagagcaacgggcgataaaaatgttcgcttatgccaatagtcatccaggattgtggaaagtcgggatgatggccggtgctcatgcggcaagctggtttatcaatggcggcaaaacaccactcaaatttggcgcgattagcgactggatggaagcacgcgatcttcctgaagctgacggagagagtttccgtagttggtttaagaaacatcaggcgcaggagaaaaagaatggataatcgaggcgaatttttgaataacgttgctcaggcactgggtcgcccgctgcgacttgaaccgcaagcagaagatgcgccgcttaacaactatgctaacgagcggcttacccaacttaaccaacagcagcgctgtgacgcgtttattcagtttgccagcgatgttatgttgacgcgctgtgagctgaccagcgaggcgaaggcggcagaagctgcaatacgtctgtgtaaagagctgggagatcagtcggtcgtgattagcggtgacacgaggctggaggaattggggattagcgaacgtttgcagcaggaatgcaatgccgttgtttgggatccggcgaaaggtgccgagaatatctcgcaggcagagcaggctaaagtgggtgttgtgtatgctgaatatggtttaaccgaatcgggaggcgtggttcttttttccgccgccgagcgcgggcgttcattgagcctgctcccggaatattctctttttatcctgcgtaaaagcactatcctgccgcgtgtagcgcaactcgcagaaaaattgcatcagaaagcgcaggccggtgaacgaatgccttcctgcattaacatcattagcggccccagttcaacggcggatattgagcttatcaaagtcgtcggagttcatggcccggtgaaagcggtgtatctgattattgaggattgttgagagagatatgaagtctggacataaacctgaagaaggcatacgaggttgaaaatagcgtttaggacaacctgacttaaccccgttccgtcatggttatgctgctcttctgtaaatatcctggtattaccaatgccaggatatttacagtgaaaaagacaggcatccattcctgaaaacgggttcccttcccggtcattgtcacttcagctttatacaggcactctctatcagaatgttgtttattactgcccagagttttgttggtattcatctaccatttttttgacaaggcaaaacattacagaaattacaatgcttagaaaaaatcccagagccaggcaaatggcagcagggtatttattttttatttctggtgagcttatagttacacagccatcaccgttcggatacaatgaccagttcctggtcaggtatatcatttttgtataaagctcactgttaattgctgaaggcgtttgtatctcatcgagaacttgcctgccattatgatattctgacgcataccatttgataatagaggcctgcacgcgagatatttcctcttcagcagttggtaaagctctcttatctcctgaccattccagccttatttctctgttcttgacatctgggctggtgtgaaaaaatgtagtaattcgctgaataacatcttcagtcattgtagtctgacaggcaaaattattattgctatcacagctaataagtatacctggcgttgtctggtttatttttaggctgtaaatcacttttatattgtctttattgatatacagaaacaacagcaccatagccatacatatagccataataaaaaggataacacgaatctttttcttcagataaaataaaatctcaatcagatcgatatcctgtttgatttgttcacgcataatatatccagagaataaaatctgtcgcagataaggttgtattaatagtctgtatcaggaatgttcgggttaaatatcagcaaaaagcccgcatcatgaatactggatatgaagcatgagagttacctcagtgtttatataaggattcggtccccctctctggaacggtaactctcaatctgatcgcttcctgcgttagttcacatcacgactcattttttcgctctcaccggcatcccatttgccacaaaatatcccgccgtgctcctcggctgcgcttcctgtccacgaatcatatccgctattttctcgccaatcataattgtcgtggcgttcaaattcccggtgataatctgcggcataatcgacgcatccaccacacgcaggccttctaacccgtgtacgcggccttcgccgtcaaccacggacatctcgtcgtaacccattttgcaggtaccgcacggatggaaggcggtttcggcgtggttacgcacgaactcatcgagctgttcatccgtctggcattcgacaccggggctgatttcgcggccacgatactgatccagcgcgggttgatgcatgatctcgcgggtgatgcgaattgcgtcgcggaactcctgccagtcctgctcgtgcgacatgtagttaaacagaatcgccggatgctggtgcgggtcgcgggatttaatccgcacatgcccacggcttggcgagcgcattgagccgacgtggcactggaaaccgtgctctttcactgcattcgagccgttatagttaatcgctactggcaggaaatggtactgaatattcggccacgcaaattcctcacggctgcgaataaatccacctgcttcaaagtggttgctggcaccaacgccagtgccgccaaacagccactccgcaccgattttcggctggttccaccactgcagggcagggtagagggaaaccggttctttgcactcatattgcagatacatctccagatgatcctgaagattttcgccgacgccgggtaattcatgcaccagcggaatatcaaactccgccagcagttcagcgttgccgacgccggagcgttgcaggatctgcggtgaggcaatcgcgcctgcacataacagcacttctttgttggccgttgcgcgggttgggatggtgctgtcgccttccagccattcgacgcccaccgcgcgtttgccgtcaaaaatgatgtgatcggtcatagcgtgagtacgaatggtcaggttaggacgcgatttggcctgatcgagatagccacgcgcggtgctggcgcgacggccctgcggcgtgacggtgcgatccatcggaccaaaaccttcctgctgataaccgttgagatcgtccgtgcgcgggtagcccgcctgcacgcccgcttcaatcatcgcttcaaacagcggattgacgccgggtttggaggtagtgacgctcaccgggccatcaccgccgtgatagtcgttttcacccatatcgcgagtctcggccttgcggtagtagggcaggcagtcgaggtagctccagttctccagaccgggttcttgcgcccagttatcgagatccagcgcattgccacggatgtagcacatgccgttgatcagcgacgatccacccagacctttaccgcgtccgcactccatgcggcggttattcataaacggttcaggttccgtttcataggcccagttgtagcgtttaccctgtagcgggaatgccagggcagcgggcatctgggtgcggaagtcaaagcgatagtccgggccgcccgcttcaagcagcagcacggaggtattcggatcttcagtcagacgggtagcgagaacgttgccggctgagccggcaccaataatgatgtagtcaaattgcaaataaacctcctggttagaatatggactggaatttagccatctcaacctggatggacttcacctgggtgtaactctggagcgtcatcacgccgttctcgcgaccaatgccggagtgtttgtagccgccaacgggcatctctgccggggattcgccccaggtgttgatccagcaaatacccgcttccagctgatgaatgacgcgatgcgcgcggttcaggtccgctgtcacgatgcccgccgccaggccgtagtcggtatcgttagcgcggcgaatgacttcgtcttccgactcgtaggtcagaatggacatcactggcccgaagatctcttcacgcacgatggtcatatcgtcgctgcaatcggtgaacactgtcggtgcaacccatgcgccgttatcgaagccatcgcctttcagtacatcgccgccgcacagtacgcgcgcgccttcctctttgcctttggcgatatagcgcagcacgttatcgcgatgcgggaagctgaccagcgggccgaagttagtttgcggatcgaaaacgtcgcccgcgcgaatgcgctcaacgcgcgccagaattttctgctcaaatgcggctttgcatttcgccggaacgaagacgcgggtgccattggtacacacctgaccggagctgaagaagtttgccatcatggcgatatcggcggcgagatcgagatccgcatcatcgaaaacgatcagcggtgatttaccgcccagttccatggtcacttctttcagggaagaggccgccgagttagccatcacttttttgccgctggcgacaccgccggtaaatgacactttggcaatgcccggatgctcggtcagatattgcccggtctccgcgcccacgcccggcaacacgttaaatacgccgtccggcaggcccgcttcgctgtaaatttcagccagctttaacgcggtaagcggggtaacttcgctcggtttgaaaatcattgcgttgcctgccgccagcgccggggcggatttccacagggcaatctggatcgggtagttccatgcgccaatccctgccactacgcccagcggttcgcggcgggtatacacaaaggacgtttcacgcaacgggatctggctgccttccagcgccgggatcagcccggcgtagtactccagcacgtccgcaccggtaacgatatcgacggttgaggtttccgaatatgcttttccggtgtcgagggtttccagttttgcgagttcgtcattgcgttcacgcagaatatcaacggcccgacgcagaatacgcgagcgctccatggcggtcatcgacgcccagattttttgcccctgctgggcgcttttcacggcgcgatcgacatcctcgcgcccggcggcctgcacggtcgccagcacgttaccgttggccgggttaatggtctcgaaggtgcgaccgctggtggcggaggtataaccaccatgtatataaagctgctgttctgccattcgggacatcacgtctcctcggttaatcggtgggtagatgctgagtgataaagtggcgggtcagggaattagcgcgggttttatccagcggtttgccgctcagagccgcgcgcagccataatccatcaatcagcgcggccaggccgtagcccgcttcctgtgcctgttcgcgcggcaattcgcgacgaaactcgctcaccagattcgacagcaagcggcggctgctgacctgctgtaaacgatagagcatcggctgatgcatactgctggcccagaacgccagccaggctttcatcgccgcactgctcacctgcgtttcatcgaagtttccgccaacaatcgcctgtaatcgctgctctgcactgccctgcggaagtgcatgtaatcgattcaaaaccgcgtcacgcagctgactggtgatatcgcgcatggttgcttccagcagaccatttttgtccctgaaatagtggctgatgatccccgtagaaacgcctgcacggcgggcgatctgcgcgatcgttgcatcgtgcatgcccacttcatttattgcttccagtgtggcgtcgatcagttgtctgcgccggatcgactgcatccccaatttgggcattttcgccactccattcatcagcggtgtttatctattaaagcggttattgattggacgttcaatataaaatgtgtcttaattgttacgaatttgattttaaatggtaacaataacagtggggatactggatgacagacctttcacacagcagggaaaaggacaaaatcaatccggtggtgttttacacctccgccggactgattttgttgttttccctgacaacgatcctgtttcgcgacttctcggccctgtggattggccgcacgctggactgggtttctaaaaccttcggttggtactatctgctggcggcaacgctctatattgtctttgtggtctgtatcgcttgttcgcgttttggttcggtgaagctcgggccagaacaatccaaaccggaattcagcctgctgagttgggcggcgatgctgtttgctgccgggatcggtatcgacctgatgttcttctccgtagccgaaccggtaacgcagtatatgcagccgccggaaggcgcgggacagacgattgaggccgcgcgtcaggcgatggtctggacgctgtttcactacggcttaaccggctggtcgatgtatgcgctgatgggcatggcgctcggatactttagctatcgttataatttgccgctcaccatccgctcggcgctgtacccgatcttcggtaaacggattaacgggccgataggtcactcagtggatattgcagcggtgatcggcactatcttcggtattgccactacgctcggtatcggtgtggtgcagcttaactatggcttgagcgtactgtttgatattcccgattcgatggcggcgaaagcggcactgatcgccttgtcggtgataatcgccacgatctctgtcacctccggtgtcgataagggcattcgcgtgttatcggagcttaatgtcgcgctggcgctgggattgatcctgttcgtattgtttatgggcgacacttcgttcctgcttaatgcactggtgctgaatgttggcgactatgtgaatcgctttatgggcatgacgctcaacagttttgccttcgaccgtccggttgagtggatgaataactggacgctcttcttctgggcatggtgggtggcatggtcgccgtttgtcggcttgttcctggcgcgtatctcgcgtgggcgtaccattcgccagttcgtgctgggcacgttgattattccgtttaccttcacgctgttatggctctcggtgttcggcaatagcgcgctgtatgaaatcatccacggcggcgcggcatttgccgaggaagcgatggtccatccggagcgcggcttctacagcctgctggcgcagtatccggcgtttacctttagcgcctccgtcgccaccattactggcctgctgttttatgtgacctcggcggactccggggcgctggtgctggggaatttcacctcgcagcttaaagatatcaacagcgacgcccccggctggctgcgcgtcttctggtcggtggcgattggcctgctgacgctcggcatgctgatgactaacgggatatccgcgctgcaaaacaccacggtgattatggggctgccgttcagctttgtgatcttcttcgtgatggcggggttgtataaatctctgaaggtagaagattaccgccgtgaaagtgccaaccgcgataccgcaccgcgaccgctggggcttcaggatcgcctgagctggaaaaaacgtctctcgcgcctgatgaattatccgggcacgcgttacactaaacagatgatggagacggtctgttacccggcaatggaagaagtggcgcaggagttgcggttgcgcggcgcgtacgtggagctaaaaagcctgccaccggaagagggacagcagttgggtcatctggatttgttggtgcatatgggcgaagagcaaaactttgtctatcagatttggccgcagcaatattcggtgccgggctttacctaccgcgcacgcagcggtaaatcgacctactaccggctggaaaccttcctgttagaaggcagccagggcaacgacctgatggactacagcaaagagcaggtgatcaccgatattcttgaccagtacgagcggcaccttaactttattcatctccatcgtgaagcgccgggccatagcgtgatgttcccggacgcgtgattgttattgcataaaaccgcgccatgtctgcatatggcgctgtttctcctacctcttgatacgttatatctatacggttaagcccttagtatctattgatgattaccagacaacagataataaaaaagaaaagaactattgcagcccaaaacctacatttgggctgttgcgaatgttcaataagtttagtcttatttaatgtaaatattgctgatcatttgaaatgacgcattattcatgagaaatgtgtatcgtaaatcaactgaaattaacgcaaccatttgttatttaaggtttaattatctgtgtgtgatattttattgaatgttttaaatattgtttttattggcattgctataatattggttatcatttgctgaatggattcagtcttaatgagtgggtttttaagggacaggcatagagtaatgatacgtatgcataaccaacatctttactcattatgtcattgaatgttgacgctatgtgtttatgagggtgaggtattttcagttgatctggattgttaaattcatataatgcgcctttgctcatgaatggatgccagtatgtagtgggaaattataaatattgaaatagtccaactacttctttattaccaaaaacttctttattaccaaaaatgagtatctgaattttaatattgcattcttgcgtgattatctcctgagtttgacttgtgattacctttttaaggtatttagcgtaactgtttttgagcgagcatcagaggtaaagataatcttcttgatagtgatgtgggatgttatacgtatggcatcgctgatgtttatggttaccccttatgtgtgctcaggaatcgacaggtaatcactcatactgaacagcgataaaagataaaggtgtgttcatgaattcatgtgattttcgtgtttttctgcaagagttcggtacaacggttcatttgtcattgcctggtagcgtatccgagaaagaacgactgctactcaagctgctgatgcagggaatgtctgtaacagaaatatcacagtacagaaatcgcagtgcaaagacaatttcacatcaaaagaaacagctctttgagaaactggggattcagagcgatattactttctggcgcgatattttctttcagtacaatccggagatcatatccgccacggggagtaatagtcacagatatattaatgataatcactatcaccatatcgtcacgcctgaagccatcagtctggcgttggaaaaccacgaattcaaaccgtggatccaaccggttttctgcgcgcagactggggtactgacgggctgtgaggtgcttgtccgctgggaacatccacaaacgggaattatcccaccggatcagtttattcctatggcggagtcatccggtcttattgtcataatgacccgccaactgatgaaacagactgcggatattctgatgccggtaaaacatttgctgccggacaatttccatattggcatcaacgtctcggcgggttgttttttggcagcgggatttgaaaaagagtgtctgaacctggttaataaattaggtaacgataaaatcaagctggttctcgagctaacggaacgtaaccctattccggtaacgccagaagccagagcgatatttgacagccttcatcagcacaacattacctttgcgctggatgactttggtacgggttatgcgacctatcgttacttgcaggcgttcccggtcgattttattaagatcgataagtcatttgtgcaaatggcgagtgtcgacgaaatctccggtcatattgtggacaatattgtcgaactagcgcgtaagcctggtctgagtatcgtggcggaaggggtagaaacccaggagcaggcggatttaatgatcggtaaaggcgttcactttttgcagggctatttgtactctccgccagtaccgggtaataaatttatctctgaatgggtaatgaaagcaggtggttgatgtaaaccgctattcacagcgcatcgggaggttggcagcgattaattctcccgatgcagtaaatcctgatagatccccgttaatatgccatttggcgcaaattgttttttaatccactgcgtcacctgacccgtagcagaatgctgagtcgccagtaacatgcgcgaatcctggcgcggattatggatttgtcgggtaaccagcagggattgcgtcatcgcctcacggaccatgtaatccggcaaaaaaccaattccttcacctaaaatctggcactgacatttggtgttgaaatctggcaccagaattgactcctgcccgtgcagcaaccagcccacttttttattaatcgtatgcgcggtgtcctccaccataatattagggtagagacgcagttggctttcggcgatgggttccggcacaaaggctaacgggtgatccggggcgatagcaaaagcccagcgaatcgcgccaatttcagtgtaatcaataccgccgccgtccagtagtgtatcgggtgcgccgatggcgatattggcctgattattaataatcgcatcccagacgccgttatacacttcggtggtgacggtaatctggcaggtaggaaactgctttttcagcacctgtaacaagcgtgcggtgtgtttgggcgtataaagcagctgattaatacaaatgcgcacacgcgcttctatgccctgcgaaatagtatcgatactgcgtttgatggcataaaaatcattcagcaggtcggtagctttgcggaaaaaataacgcccggactccgttaactcaatgctgcgggtactgcgagtgaacagcaccacatccagccccgtctccatacgcttaatggtgtagctaatggcggaagtggttaaacccaactcttctgcggctttactgaagctgccaaaacgcgcagcggtagtaaatgccaacagattctcttcggtaaaaattgagttcattaaaccattctcgccattatctactatgaatttctccagctatgactgtagaggtatcggttaaagatagataatcatttttgaataacttttaatacccgtcgcgtttagtcgtcgcttcgcttaatttttgtccaccatattctgaaattacccccacgcagttacccgccagaaaacccagtaacgtcaccgtccagttcatcccgctggcaaaaaacagcgtcatgccgagaaagccaccgggaataaaggacagtaaccagaaacgcccttgccagaccactaccgccgagaagggtacggtagtaattacgctcgcccagaacgcggacagtccacttacagaggccagccaaccagcagtcagcgcggcgaaaaacgcccacaccatcccggaataattaaccgccagacttctgataaaccccgatttaccgccgcctgcggcataaaaactgcaaaaggcgacgaagccaatggttcctaataattcccatccttgagagagcccgacatgtgaagacactaactgccaaagccctgcacaaataccgacggtgacacccgttgccgtgagtccgttcatcttgttcccctctggttagacatggacgaaagctactcttacatgtgcagactatagagaaataaaacctgattgagtgaaagggtatcgggtcaaagaaacaaatattgcactaccgcacactgcgaaaagattgttgaatattattcaacaaaaaggcgagatacggcgaattaaatttaagcgggttcttttatcagattatcgttgctattctcaattcatcgaaaacagccacaaaaaccaggggaatgtgaatgagtataaaaaatctacctgccgactatttattggctgcacaacagggtgatatcgataaagtaaaaacctgccttgcgctgggtgtcgatattaatacctgcgatcgtcaggggaaaacggcaattacgctggcaagtttatatcagcaatatgcttgcgttcaggcattaattgatgccggagcggatattaataagcaagatcatacctgtttaaatccttttttaattagctgtctgaacgatgatttaacgctactacgaattattttaccggctaaacccgatcttaattgcgtaacccgttttggcggtgtcggcctgacgcctgcctgtgaaaaaggccatttaagtattgtaaaagagcttttggcgcatacggagattaacgttaaccagaccaaccatgtaggctggacgccgctactggaagcgattgtgcttaatgatggtggtattaaacagcaggcgattgtgcagttattgctggaacacggtgccagcccgcatctgaccgataaatatggcaaaacgccactggaactggcgcgggaacggggctttgaagagattgcgcagttactgattgccgcaggtgcataaaccgggaggcttgctatcaacacaccagaaagacggtgtgtgtgggcgctaactgcggatgcggattttctggcgcagcgggggcaaggacaggttgaacaggtctttgccagagcggtaaatatcgcactcccggctcgccagcagttgctgacgctgctttgtgaagagtacgacaatgcgccaaacagttgtcggttggcactcactcactttgatgatctgttccggcatggtgataaggttcagtttgacgatcaaggtattacggttggtcaacatcttcatatagagatgagtcgttgtcggcgttggctgtccccaaccttgcaaatgaccgctgtgaattttcaccttatcgcctggctacagtggcacgacattattcatcagcacctgggggaaaatgaaaccctgtttaattatcgcggcgataatccgttttatcaggcgttaaataaagaattacatattaaacgacgggcagttattcaggccgtaaacgataaacaaaatatcgcctcagcggtcgccagtatgatggggttagggattggccttacgccatcagccgacgattatttaacaggtctggcgcttattttatttattcccgggcatccggcggaaaaatacaaagaggaattttatctcggtctgcaacgcggcaaaaataataccacattattaagtgccataacgctggaagccgcattacaacaacgctgccgggaaaatattcatcgttttattcacaacattatttatgacatccctgggaacgcaactcaggcaatagaaaaaattaaacatattggctccagttccggctgcgacatgctgtatggcatggccgatggttgtgcgctgagccaaacctacggagggaattatgtcagttaaaatagtcattaaaccgaatacctattttgattctgtctcgctgatgtctatctccacgcgtgcaaataaactcgacggcgtcgagcaggcatttgtggcgatggcgaccgaaatgaataaaggcgtgctgaagaatttaggactgctgacgccggagctggagcaggcgaaaaacggcgacctgatgattgtcatcaatggtaaatcgggtgcggacaacgagcagttgctggtggagattgaagaactgttcaacaccaaagcgcaaagcggctcgcacgaggcgcgttacgccactattggcagcgccaaaaagcatatcccggaaagtaacctggcggtgatttcggtcaacggtctgtttgccgctcgcgaagcgcgtcaggcgctgcaaaacgatctcaacgtgatgctgttttccgataacgtctcagttgaagatgaactggcgctcaagcaactggcccacgaaaaagggctgctgatgatggggccagactgtggcacggcgattatcaacggcgcggcgctctgttttggtaacgccgtgcgtcgcggcaacatcggtattgttggcgcatccggcaccggcagtcaggagttgagcgtccgcattcatgaatttggcggcggcgtttcgcaactgattggcaccggcgggcgcgacctgagcgagaaaatcggcggcctgatgatgctcgacgccatcgggatgctggaaaacgatccgcaaactgaaatcattgcgcttatctccaaaccgcctgcgcctgcggtggcccgcaaagtgctggaacgtgcgcgcgcctgccgcaagccggtggtcgtctgcttcctcgatcgtggcgaaacgccagtggatgagcaggggctacagtttgcccgcggcaccaaagaggcagcgctaaaagcggtgatgctctccggcgtgaaacaggaaaatctcgacctgcatacgcttaaccagccgttgattgcggatgtgcgtgcgcgtctgcaaccgcagcagaaatacattcgtggcctgttctgcggcggcacgctgtgcgacgaaaccatgttcgcggtgatggaaaaacatggcgatgtctacagtaacattcagcccgatccggaattccgcctgaaagatatcaaccgcagcatcaaacacaccttcctcgactttggcgatgacgacttcaccaacggcaagccgcacccgatgattgaccccaccaaccgcatcagtcgcttgatcgaagaggcgcgcgatccagaagtggcggtgatcgtgatggattttgtgctcggatttggatcgcatgaagatccggtcggctccaccatcgagacgatcaaagaagcgaaagcgatcgccgctgccgaaggacgcgagttgatcattctcgcctatgtgctgggtaccgatcttgatacgccatcgttagaacaacaaagccagatgctgcttgatgccggagtgattctggcgagcagcagcaccaataccggattgctggcgcgtgaatttatctgcaaaggggaggaagcctgatgagccagtcactgtttagccaaccattgaacgttattaacgtcggcatcgccatgtttagcgatgacctgaaaaagcagcatgtagaagtgactcaactcgactggacgccgccggggcagggcaatatgcaggtggtgcaggcgctggataacattgccgattcgccgctggcggacaaaatcgccgccgctaaccagcaggcgctggagcgtattatccagtcgcatccggtgctgattggttttgatcaggcgattaacgtggtgccgggcatgacggcgaaaaccattcttcacgccgggccgccgatcacctgggaaaaaatgtgcggcgcgatgaaaggcgcggtcaccggagcgctggtgttcgaaggactggcgaaagatctcgacgaggcggctgaactggcggcttccggggagatcaccttctcgccgtgtcacgagcacgactgcgtgggatcgatggcgggtgttacctcggcctcgatgtttatgcacatcgtaaaaaacaaaacctacggcaacatcgcttataccaacatgagcgagcagatggcgaagattttgcgtatgggcgctaacgaccagagcgtgattgaccgcctgaactggatgcgtgatgtgcagggaccaatactgcgcgacgcgatgaaaattatcggcgaaatcgatctgcgcttaatgctggcgcaggcgctgcatatgggcgatgagtgccataaccgcaataacgccgggacgacactgctgattcaggcgctgacgccggggattattcaggcgggttattccgtcgagcaacagcgcgaagtgtttgagtttgtcgccagcagcgactacttctccggcccgacgtggatggcgatgtgtaaagcggcgatggatgcggcgcatggcatcgaatacagcaccgtggtcaccaccatggcgcgtaacggcgtcgagttcggcctgcgggtcagcggcctgccggggcaatggtttagcggcccggcgcagcaggtgatcggcccgatgtttgccggttataagccggaagattcggggctggatatcggcgacagcgccatcaccgaaacctacggtattggcggatttgctatggcgaccgcgcccgctatcgtcgcgctggtgggcggcacggtggaagaagctattgatttctcccgtcagatgcgcgaaatcaccctcggtgaaaaccccaacgtcaccattccgctgctcggttttatgggcgtgccgtcggcaatcgacatcacccgcgtgggtagcagcggcattctgccggtgatcaacaccgccatcgcccataaagatgcgggcgtcggcatgattggcgcgggcattgtgcatccaccttttgcctgcttcgagaaagccattcttggctggtgcgaacgttacggcgtctgacctacatgttcatgccggatgcggcgtgaacgccttatccggcctacgaatggcgcaagaatctgtaggcctgataagcgtagcgcatcaggcatttgtcaccattgccggatgcggcgtgaacgccttatccggcctacgagtggcgcgagaatctgtaggcctgataagcgtagcgcatcaggcatttgtcaccattgccggatgcggcgtgaacgccttatccggcctacgagtggcgcgagaattgtaggcctgataagcgtagcgcatcaggcagtctggcgttggtcataaccccatcaccctctgtagcggacataacaacatgaaagagcttgtggtcgttgccattggtggcaacagcattatcaaagataacgccagccagtcgattgagcatcaggcggaggcggtgaaagccgtcgccgatacggtgctggaaatgctggcttccgattacgacattgtgctgacccacggcaacgggccgcaggtcgggctggatttacgccgtgcggagattgcccacgagcgcgaagggctgcccttaacgccgctggcgaactgtgtggcagatacgcagggcggcatcggctatctgatccaacaggcgctgaataaccggctggcgcgtcacggcgagaagaaagccgtcaccgtggtgactcaggtggaagtggataaaaacgatccaggttttgcccatcccaccaagcccatcggcgcattctttagtgacagccagcgtgacgaattacaaaaggcaaaccctgactggtgttttgttgaagatgccgggcggggctatcgccgcgtggtcgcctcgccggaaccgaaacgtattgtcgaagcacctgccattaaagcgctgatccaacaaggttttgtcgtaattggcgcgggcggcggtggaattccggtagtgcgtactgacgcgggagattaccaaagcgtggacgcggttatcgacaaagatctctctaccgcgctgctggcccgtgaaattcacgccgacattcttgtgatcaccactggcgtcgaaaaagtgtgtattcactttggcaaaccgcagcagcaggcgctcgatcgggtggatattgccaccatgacccgctatatgcaggaagggcatttcccgcccggcagcatgttgccaaaaatcatcgccagcctgacatttttagaacaaggcggcaaagaagtgattatcatcacgccggaatgcctgcctgcggcgctgcgcggcgaaacgggcactcatattattaaaacgtaaggacgtaagatgaaagaaagcaatagccgccgtgaatttctgagccagagcggtaagatggtcaccgccgccgcgctgtttggtacctctgtgccgctcgcccatgcggcggtagctggcaccctaaactgcgaagcgaacaacaccatgaaaatcactgacccgcattactatctcgataacgtgctgctggaaaccggttttgactacgaaaatggcgtggcggtgcagacccgcacggcgcgccagaccgtggagattcaggacggcaaaattgtcgccctgcgcgagaacaagctgcatccggacgccacgctgccgcactatgacgctggcggtaagctgatgctgcccaccacccgcgacatgcatattcatctcgacaaaaccttttacggcgggccgtggcgctcgctcaatcgtccggcaggcaccaccatccaggacatgatcaaactcgagcagaaaatgctgccggaactgcaaccgtacactcaggagcgggcagaaaaactgattgatttattgcagtcgaaaggcaccaccattgcccgcagccactgcaatatcgaaccggtttccggcctgaaaaatctgcaaaatttgcaggcggtgctggcgcgacgtcaggcgggctttgagtgtgaaatcgtcgccttcccgcagcacggtttgctgctgtcgaaatctgaacctttaatgcgtgaagcgatgcaggcgggggcgcattacgtcggcggcctggacccgaccagtgttgatggcgcgatggaaaaatccctcgacaccatgttccagattgcgctggactacgacaaaggcgtcgatattcacctgcacgaaaccactccggcaggcgtggcagccatcaattatatggttgaaacggtagagaaaacgccacagctgaagggcaagctgaccatcagtcacgcctttgcgctggcaacgctcaacgagcaacaggtagatgaactggcgaaccggatggtggtgcaacaaatttctatcgcctcgacggtgccgattggcacgctgcatatgccgctcaaacagttgcacgacaaaggcgtaaaagtgatgactggcactgacagcgttatcgaccactggtcgccttatggtctgggcgacatgctggaaaaagccaatctgtacgcgcagctctatattcgtcctaacgaacagaacctctcccgctcgctgtttttagccactggcgatgtattgccgctgaatgaaaaaggcgagcgtgtatggccaaaagcgcaggatgacgccagctttgtgctggtggacgcctcctgttccgccgaggcggtggcgcgtatctcgccgagaaccgcaacgttccataaagggcaactggtgtgggggagtgtggcaggttgatgcgcatttgaaacgcctgcaacggtgaatagtaagagatttaagccccagggagtggggcaatctgaatatgagtgtgtcggcagaaatggacattatctttgaggaatatgcccttattgacgttgtgtagataactatttgtctacgtgaaaagatcatcagttttgccgattttagtcttttacagatagcaaatatcacacttacaggcgctcgccttatggggaacgttgctgctctgtttcattcaggctcgcggcatgttggggctggatcgggtggtttaaatattggctatattcaatggacgcgttttgccgcgatgacatatcaggcgttgccaaatacacatagctaatcaggagtaaacacaatgaagatcaaagctgttggtgcatattccgctaaacaaccacttgaaccgatggatatcacccggcgtgaaccgggaccgaatgatgtcaaaatcgaaatcgcttactgtggcgtttgccattccgatctccaccaggtccgttccgagtgggcggggacggtttacccctgcgtgccgggtcatgaaattgtggggcgtgtggtagccgttggtgatcaggtagaaaaatatgcgccgggcgatctggtcggtgtcggctgcattgtcgacagttgtaaacattgcgaagagtgtgaagacgggttggaaaactactgtgatcacatgaccggcacctataactcgccgacgccggacgaaccgggccatactctgggcggctactcacaacagatcgtcgttcatgagcgatatgttctgcgtattcgtcacccgcaagagcagctggcggcggtggctcctttgttgtgtgcagggatcaccacgtattcgccgctacgtcactggcaggccgggccgggtaaaaaagtgggcgtggtcggcatcggcggtctgggacatattgggattaagctggaccacgcgatgggggcacatgtggtggcatttaccacttctgaggcaaaacgcgaagcggcaaaagccctgggggccgatgaagttgttaactcacgcaatgccgatgagatggcggctcatctgaagagtttcgatttcattttgaatacagtagctgcgccacataatctcgacgattttaccaccttgctgaagcgtgatggcaccatgacgctggttggtgcgcctgcgacaccgcataaatcgccggaagttttcaacctgatcatgaaacgccgtgcgatagccggttctatgattggcggcattccagaaactcaggagatgctcgatttttgcgccgaacatggcattgtggctgatatagagatgattcgggccgatcaaattaatgaagcctatgagcgaatgctgcgcggtgatgtgaaatatcgttttgttatcgataatcgcacactaacagactgaaaaaattaataaatacgctgtggtttaacatattaacttcgctctccacttaactttttagttaaggagagcgaaataatatcaaagtagcagtaaaacctataacgtaaattcaaattgttaaattaactccctccagtacacaatatttcacacgttagttatgagcgatttctgatagtgcctggtttaattagagctttattatctgcgacgtttatttttatttaagagagatcgcgatgatatcattaaaagctccgcacaataatttgatgccatatacgcaacaaagcatacttaatacggttaaaaacaatcagttaccagaggatatcaaaagctccctggtttcctgtgtcgatatattcaaggttttgattaaacaatattatgattatccttatgattgtcgtgatgatttagtcgatgacgacaaactcattcatctcatggctgccgtacgagactgtgagtggtcagacgataacgcactcaccataaatgtgcagtttaatgatttccctggattttatgactggatggattaccctgatcacccggttaagtttgtttttcgtatacttgaaaatcaaaaagggacagtttgggtatatgaccaggatgatgcgtttcttgatattaaagcaaacgtgcaggctggacgctttaccgggcttaagaaattagtgcagtttatcgattcagtgcgaacagattgcaaatgtattcttcttgaacaccatatgcctttgctgagaattttccctaaagggaaagagtgtatgcatgtggaaaaatggcttcgcgaaatgtcgtctattccggagacagacgcgcccattaagcaggcgcttgcgcatggattattattacacttaaaaaatatctaccctgtttttcctgaatcactggtgatgttattgctctctgttctggacgtaaaaacatacagagatgatgcgcgattaaatcaatggatatctaatagagtccaggaattaggcgacagatattatcctgtaaataagcacgttaaaatccgctacactctttagttcagaaagggttccacctgcaagttgttattccacctgagagtgaatcgcaatgcaggtaatcatttcatctgtatatctgtatgccaactggcattccatctcttttttcgccgatattttgttgtgatcggcgacacttcgcttaaaaaagcaccagtagtggtttcgcagccatgcggtgtataaaaaatgatctcatgcagatgttttgtgaatgtgttggttgacattcatatgaaaaaaatcataattccatcatgtttgtgtggggtcttttctgtatcttacgcatcgcactcaagcctgacagaaaatatgctgtaaggctcatatcaaaaaccgccattagctcatcaggaagagcagacgacaaccaggattgttgtatggtacggggttcgaggcctcgatggcggtccaacttttcaaaactcttctgaatcagatccccttattatcatccctgcaaagtggaacattgccattgtttggctattcaggatggggcagaccaatgaaaaaagcccacacaggggagagtgggctgaaatgggaagctaaagactcaagtaaacttatcggaaataaggaccacgcattacgggggctatcatcgccgatggccgtgattcggcaaatcaggttgattacgtagagagtaaattatctgctcaccgctgcgtcaccccttcgtaaatcaggcgtagcgcgaatacaccaataattgcaccaataacccgactggcaacgcgttgcatacgcccataagcacgacgcacagcgggcaaagaaaacgcctgactaagaaaaactcgccagataattgatgcgagcacaatccccgcccaggccattaaacgtgcccatgttggtgtttcggcatttaatgttactgagaaaatactgataaaaaataaaacggtttgcgggttagagagatcggtaattaatccgcggcgaaaaaagacataccagggggcgctaatcggttgttgtagtgtgttcatttgcggtgttgactggcggcgcatgctgcaccacgcaaaccataagagataagcgccgccgacgattctgataagcgaaaaaatctcctcacactgcgtaattagcgttgcaagaccaaacaaacccaacccggaataaaatgcatcgcccagcgccacgcccagcccggtcagcacccctgcgcgtcgaccggaagccaggctggtttgtactaccacaaagagattggctcccggattaaaaaaagtaatcacgaacagtcctacggtcaggtaaacggcatgcaaaggatccatagtgatttcatccataaataagtgaactaactgcatcatatttctaccaaaaataatcgggtgcgagagagatcacaaagtgtcttatttccggttactggcgtttatgccctgactgaactaattattaatcaacccaataatgtgggtgggtgatagtgtgataacaactctggagccgtaatatgaaaataatctctaaaatgttagtcggtgcgttagcgttagccgttaccaatgtctatgccgctgaattgatgaccaaagcggaatttgaaaaagttgaatcgcagtatgaaaaaataggtgatatttcaaccagcaatgaaatgtcgactgcagatgcaaaagaagatttgatcaaaaaagcggatgaaaaaggggctgatgtgttggtactgacctccggtcaaactgacaataagatccacggcacggcaaatatttataagaagaagtaattctgaatcctatgtaaacatctccgatgcgtaagtttatcggtgatcatctattgaaatttatgccggataaagcgttcgcgctgcattcggcagttcagcttttcagccgccgccagaacgtcgtccggctgatgcctaaataattcgccgctgctgttttatcgccattaaatttctccagtgcctgttgtggtgtcagtaagcgtggagcgggagttttcgccgactcgcgcgccagttccggcagtagcagttgcataaactgcggcgttaaatccggcgtcggttccacacttaaaaacagcgccagtcgttccatcatattgcgcagttcacgaatattgcctggccagtcgtagtgcagcagcacagtttcacttgcctgtaacccctggcgtaatgcagcagaaaatggggcggagagcgccgccagagacactttcaaaaagctttccgccagcggaagaatatccgccacccgctcgcgcagtggtggcaattgcagacgcaaaatactcagccgataaaacagatcacggcgaaaacgtccttgctgcatatcttcttccagattgcagtgagtggcgctaatgacccgtacatctaccggaacaggctgatgcccgccgacgcgggtgacctctttttcttccagcacccgcagcagccgggtctgcaaaggtagcggcatttcgccaatctcatccagaaacagcgtaccgccgtgggcaatttcgaacagcccggcgcgacctccgcgtcgcgagccggtaaacgccccttcctcatagccaaacagttctgcttccagcagcgattcggcaatcgccccgcagttgacggcaacaaacggatgcgactttttgccctgtcgcgcatcgtggcgggcaaaatattcccgatgaatcgcctgggccgccagctctttgcccgtccccgtttccccctcaatcaacaccgccgcactggagcgggcatacagcaaaatagtctgccgtacttgttccatctgtggtgattgaccgagcatatcgcccagcacgtaacgagtacgcagggcgttgcgggtggcatcgtgagtgttatggcgtaacgacatgcgcgtcatatccagcgcatcgctgaacgcctggcgcacggtggcggcggaatagataaaaattccggtcattccggcttcttctgccaaatcggtaatcagccccgcgccgaccaccgcttcggtgccgttagcttttagctcgttaatctgcccgcgtgcgtcttcctcggtaatgtagctacgttggtcgaggcgcaaattaaaggttttttgaaacgccaccagcgctggaatggtttcctgataggtgacaacgccgatagaagaggtgagttttccggcttttgccagtgcctgtaacacatcgtagccgctcggtttaatcaaaataactggcactgacaggcggcttttcaggtacgcgccgttagagccagccgcgatgatggcgtcacagcgttcgtttgccagtttcttgcggatgtaggtcactgctttttcaaagccaagctgaataggggtaatgttcgccaggtgatcaaactcgaggctgatatcgcgaaacagctcgaacaggcgcgttacagataccgtccagataaccggtttgtcgtcattaagccgtggtggatgtgccatagcgcaccgcaaagttaagaaaccgaatattgggtttagtcttgtttcataattgttgcaatgaaacgcggtgaaacattgcctgaaacgttaactgaaacgcatatttgcggattagttcatgactttatctctaacaaattgaaattaaacatttaattttattaaggcaattgtggcacaccccttgctttgtctttatcaacgcaaataacaagttgataacaaaggatgggctatgtctctacactctccaggtaaagcgtttcgcgctgcactgactaaagaaaatccattgcagattgttggcaccatcaacgctaatcatgcgctgttggcgcagcgtgccggatatcaggcaatttatctttctggcggtggcgtggcggcaggttcgctggggctgcccgatctcggtatttctacccttgatgatgtgctgaccgacattcgccgtatcaccgacgtttgttcgctgccgctgctggtggatgcggatatcggttttggttcttcggcctttaacgtggcgcgcaccgtgaaatcgatgattaaagccggtgcggcaggattgcatattgaagatcaggttggtgcgaaacgctgcggtcatcgtccgaataaagcgatcgtctcgaaagaagagatggtggatcggatccgcgcggcggtggatgcgaaaaccgatcctgattttgtgatcatggcgcgcaccgatgctctggcggtagaggggctggatgcggcgatcgagcgtgcgcaggcctatgttgaagcgggtgccgagatgttgttcccggaggcgattaccgaactcgccatgtaccgccagtttgccgatgcggtgcaggtgccgatcctcgccaacatcaccgaatttggtgccacgccgctgtttaccaccgacgaattacgcagcgcccatgtcgcaatggcgctgtacccactttcagcgttccgcgccatgaaccgcgccgctgaacatgtctacaacgtcctgcgccaggaaggcacgcagaaaagcgtcatcgacaccatgcagacccgcaacgagctgtacgaaagcatcaactactaccagtacgaagagaagctcgacaacctgtttgcccgtagccaggtgaaataaaaaacgcccgttgattgtattcgacagccgatgcctgatgcgtcgctgacgcgacttatcaggcctacgaggtgcactgaactgtaggtcggataagacgcatagcgtcgcatccgacaaccgatgcctgatgcgccgctgacgtgacttatcaggcctacggggtgcactgaactgtaggtcggataagacgcatagcgtcgcatccgacaaccgatgcctgatgcgccgctgacgcgacttatcaggcctacggggtgaactgaactgtaggtcggataagacgcatagcgtcgcatccgacaacaatctcgaccctacaaatgataacaatgacgaggacaacatgagcgacacaacgatcctgcaaaacagtacccatgtcattaaaccgaaaaaatctgtggcactttctggcgttccggcgggcaatacggcgctctgcaccgtgggtaaaagtggcaatgacctgcattaccgcggctacgatattcttgatctggcgaaacattgcgaatttgaagaagtggcgcatctgctgatccacggcaaactgccgacccgtgacgaactcgccgcttacaaaacgaaactgaaagccctgcgcggtttaccggctaacgtgcgtaccgtgctggaagccttaccggcggcgtcgcacccgatggatgttatgcgcaccggtgtttccgcgctcggctgcacgctgccagaaaaagaggggcataccgtctctggcgcgcgggatattgccgacaaactgctggcgtcgcttagctcgattctcctttattggtatcactacagccacaacggcgaacgcatccaaccggaaaccgatgacgactccatcggcggtcacttcctgcatctgctgcacggcgaaaagccatcgcaaagctgggaaaaggcgatgcatatctcgctggtgctgtacgccgaacacgagtttaacgcctccacctttaccagtcgggtgattgcgggcaccggctctgatatgtattccgcgattattggcgcgattggcgcactgcgcgggccaaaacacggcggggcgaatgaagtgtcgctggagatccagcaacgctacgaaacgccggacgaagccgaagcagatatccgcaagcgcgtggaaaacaaagaagtggtcattggttttggtcatccggtttacaccatcgctgacccgcgccaccaggtgattaaacgtgtggcgaagcagctctcgcaggaaggcggctcgctgaagatgtacaacatcgccgatcgcctggaaacggtgatgtgggagagcaaaaagatgttccccaatctcgactggttctctgctgtttcctacaacatgatgggcgttcccaccgagatgttcacaccactgtttgttatcgcccgcgtcaccggctgggcggcgcacattatcgaacaacgtcaggacaacaaaattatccgtccttccgccaattatgttggaccggaagaccgcccgtttgtcgcgctggataagcgccagtaaacctctacgaataacaataaggaaacgtacccaatgtcagctcaaatcaacaacatccgcccggaatttgatcgtgaaatcgttgatatcgtcgattacgtcatgaactacgaaatcagctctaaagtggcctacgacaccgcacattactgcctgctcgacacgctcggctgcggtctggaagctctcgaatacccggcctgtaaaaaactgctggggccaattgttcccggcaccgtcgtacccaacggcgtgcgcgtccccggaactcagttccagctcgaccccgtccaggcggcatttaacatcggcgcgatgatccgctggctcgatttcaacgatacctggctggcggcggagtggggccatccttccgacaacctcggcggcattctggcaacggcggactggctttcgcgcaacgcggtcgccagcggcaaagcgccgttgaccatgaaacaggtgctgaccgcaatgatcaaagcccatgaaattcagggctgcatcgcgctggaaaactcctttaaccgcgtcggcctcgaccacgttctgttagtgaaagtggcttccaccgccgtggtcgccgaaatgctcggcctgacccgcgaggaaattctcaacgccgtttcgctggcgtgggtggacggtcagtcgctgcgcacctatcgccatgcgccgaacaccggcacgcgtaaatcctgggcggcgggcgatgccacttcccgcgcggtacgtctggcactgatggcgaaaacgggcgaaatgggttacccgtcagccctgactgcgccggtgtggggcttctacgacgtctcctttaaaggtgaatcgttccgcttccagcgcccgtacggttcctacgttatggaaaatgtgctgttcaaaatctccttcccggcggagttccactcccagacggcagttgaagcagcgatgacgctctatgaacagatgcaggcagcaggcaaaacggcggcggatatcgaaaaagtgaccattcgcacccacgaagcctgtattcgcatcatcgacaaaaaagggccgctcaataacccggcagaccgcgatcactgcattcagtacatggtggcgatcccgctgctattcgggcgcttaacggcggcagattacgaggacaacgttgcgcaagataaacgcattgacgccctgcgcgagaagatcaattgctttgaagatccggcatttaccgctgactaccacgacccggaaaaacgcgccatcgccaatgccattacccttgagttcaccgacggcacacgatttgaagaagtggtggtggagtaccccattggtcatgctcgccgccgtcaggatggtattccgaaactggtcgataaattcaaaatcaatctcgcgcgccagttcccgactcgccaacagcagcgcattctggaggtttctctcgacagagctcgcctggaacagatgccggtcaatgagtatctcgacctgtacgtcatttaagtaaacggcggtaaggcgtaagttcaacaggagagcattatgtcttttagcgaattttatcagcgttcgattaacgaaccggagcagttctgggccgagcaggcccggcgtattgactggcagacgccctttacgcaaacgctcgatcacagcaatccgccgtttgcccgttggttttgtgaaggccgaaccaacttgtgccacaacgccatcgaccgctggctggagaaacagccagaggcgctggcgctgattgccgtctcttcggaaacagaagaagagcgcacctttacctttcgtcagctgcatgacgaagtgaacgcggtggcctcaatgttgcgttcattgggtgtgcagcgcggcgatcgggtgctggtgtatatgccgatgattgccgaagcgcatattactctgctggcctgcgcgcgcattggcgctattcactcggtggtgtttggtggatttgcctcgcacagcgtggcggcgcgaattgatgacgctaaaccggtgctgattgtctcggctgatgccggagcgcgcggtggcaaaatcattccctataaaaaattgctcgacgatgcgataagtcaggcgcagcaccagccacgccatgttttgctggtggatcgcgggctggcgaaaatggcgcgcgtcagcgggcgggatgtcgatttcgcgtcgttgcgccatcaacacatcggcgcgcgggtaccggtggcgtggctggaatccaacgaaacctcctgcattctctacacttccggcacgaccggcaaacctaaaggcgtgcagcgtgacgtcggcggatatgcggtggcgctggcgacctcgatggacaccatttttggcggcaaagcgggcagcgtgttcttttgcgcatcggatatcggctgggtggtggggcattcgtatatcgtttacgcgccgctgctggcggggatggcgactatcgtttacgaaggattgccgacctggccggactgcggcgtgtggtggaaaatcgtcgagaaatatcaggttagccggatgttctcagcgccgaccgccattcgcgtgctgaaaaaattccctaccgctgaaattcgcaaacacgatctctcgtcgctggaagtgctctatctggctggagaaccgctggacgagccgaccgccagttgggtgagcaatacgctggatgtgccggtcatcgacaactactggcagaccgaatccggctggccgattatggcgattgctcgcggtctggacgacaggccgacgcgtctgggaagccccggtgtgccgatgtatggctataacgtgcagttgcttaatgaagtcaccggcgaaccgtgtggcgtcaacgagaaagggatgctggtggtggaagggccgctgccgccggggtgtattcagaccatctggggcgacgacggccgctttgtgaagacttactggtcgctgttttcccgcccggtgtacgccacctttgactggggcatccgtgacgctgacggttatcactttattctcgggcgcactgacgatgtaattaacgttgccgggcatcggctggggacgcgcgagattgaagagagtatctccagccatccgggcgttgccgaagtggcggtggttggggtgaaagatgcgctgaaagggcaggtggcggtggcgtttgtcattccgaaagagagcgacagtctggaagatcgtgatgtggcgcactcgcaagagaaggcgattatggcgctggtggacagccagattggcaactttggccgcccggcgcacgtctggtttgtctcgcaattgccaaaaacgcgatccggaaaaatgctgcgccgcacgatccaggcgatttgcgaaggacgcgatcctggagatctgacgaccattgatgatcctgcgtcgttggatcagatccgccaggcgatggaagagtaggttattgtcggatgcgtcgcgcggtgcatccggcactgtgtgccgatgcctgatgcgacgctgacgcgtcttatcatgcctacggacctgaaccgtaggtcggataaggcgctcgcgtcgcatccgacaccatgcgccgatgcctgatgcgacgctgacgcgtcttatcatgcctacaggtctgaaccgtaggtcggataaggcgctcgcgccgcatccgacaccatgctcagatgcctgatgcgacgctgacgcgtcttatcaggcctacccactgtttttacaccgataatttttcccccacctttttgcactcattcatataaaaaatatatttccccacgaaaacgattgctttttatcttgagatgaatagaatgcggcggattttttgggtttcaaacagcaaaaagggggaatttcgtgtcgcaagataacaactttagccaggggccagtcccgcagtcggcgcggaaaggggtattggcattgacgttcgtcatgctgggattaaccttcttttccgccagtatgtggaccggcggcactctcggaaccggtcttagctatcatgatttcttcctcgcagttctcatcggtaatcttctcctcggtatttacacttcatttcttggttacattggcgcaaaaaccggcctgaccactcatcttcttgctcgcttctcttttggtgttaaaggctcatggctgccttcactgctactgggcggaactcaggttggctggtttggcgttggcgtggcgatgtttgctattccggtgggcaaggcaaccgggctggatattaatttgctgattgccgtttccggtttactgatgaccgtcaccgtcttctttggcatttcggcgctgacagttctttcggtgattgcggttccggctattgcctgccttggcggttattccgtgtggctggccgttaacggcatgggcggcctggacgcattaaaagcggtcgttcccgcacaaccgttagatttcaatgtcgcgctggcgctggttgtggggtcatttatcagtgcgggcacgctcaccgctgactttgtccggtttggtcgcaatgccaaactggcggtgctggtggcgatggtggcctttttcctcggcaactcgttgatgtttattttcggtgcagcgggcgctgcggcactggggatggcggatatctctgatgtgatgattgctcagggactgctgctgcctgcgattgtggtgctcgggctgaatatctggaccaccaacgataacgcactctatgcgtcgggtttaggtttcgccaacattaccggtatgtcgagcaaaacgctttcggtgatcaacggtattatcggtacggtctgcgcattatggctgtataacaattttgtcggctggttgaccttcctttcggcagctattcctccggtaggtggcgtgatcatcgccgactatctgatgaaccgtcgccgctatgagcactttgcgaccacgcgtatgatgagtgtcaattgggtggcgattctggcggtcgccttggggattgccgcaggccactggttaccgggaattgttccggtcaacgcggtattaggtggcgcgctgagctatctgatccttaacccgattttgaatcgtaaaacgacagcagcaatgacgcatgtggaggctaacagtgtcgaataacgctttacaaacaattattaacgcccggttaccaggcaaagaggggctgtggcagattcatctgctggacggaaaaatcagcgccattgatgcgcaatccggcgtgatgcccataactgaaaacagcctggatgccgaacaaggtttagttataccgccgtttgtggagccgcatattcacctggacaccacgcaaaccgccggacaaccgaactggaatcagtccggcacgctgtttgaaggcattgaacgctgggccgagcgcaaagcgttattaacccatgacgatgtgaaacaacgcgcctggcaaacgctgaaatggcagattgccaacggcattcagcatgtgcgtacccatgtcgatgtttcggatgcaacgctaactgcgctgaaagcaatgctggaagtgaagcaggaagtcgcgccgtggattgatctgcaaattgtcgccttccctcaggaagggattttgtcgtatcccaacggtgaagcgttgctggaagaggcgttacgcttaggggcagatgtagtgggggcgattccgcattttgaatttacccgtgaatacggcgtggagtcgctgcataaaaccttcgccctggcgcaaaaatacgaccgtctcatcgacgttcactgtgatgagatcgatgacgagcagtcgcgctttgtcgaaaccgttgctgccctggcgcaccgtgaaggcatgggcgcgcgagtcaccgccagccacaccacggcaatgcactcctataacggggcgtatacctcacgtctgttccgcttgctgaaaatgtccggtattaactttgtcgccaacccgctggtcaatattcatctgcaaggacgattcgatacgtatccaaaacgtcgcggcatcacgcgcgttaaagagatgctggagtccggcattaacgtctgctttggtcacgatgatgtcttcgatccgtggtatccgctgggaacggcgaatatgctgcaagtgctgcatatggggctgcatgtttgccagttgatgggctacgggcagattaacgatggcctgaatttaatcacccaccacagtgccagaacgttgaatttgcaggattacggcattgccgccggaaacagcgcaaacctgattatcctgccggctgaaaatgggtttgatgcgctgcgccgtcaggttccggtacgttattcggtacgtggcggcaaggtgattgccagcacacaaccggcacaaaccaccgtatatctggagcagccagaagccatcgattacaaacgttgaacgactgggttacagcgagcttagtttatgccggatgcggcgtgaacgccttatccggcctacgtagagcactgaactcgtaggcctgataagcgtagcgcatcaggcaattccagccgctgatctgtgtcagcggctaccgtgattcattcccgccaacaaccgcgcattcctccaacgccatgtgcaaaaatgccttcgcagcggcagtctgccagctgtagtttatgccggatgcggcgtgaacgccttatccggcctacgtagagcactgaactcgtaggcctgataagcgtagcgcatcaggcaattccagccgcagacctgtgtcagcggctaccgtgattcatttccgccaacaaccgcgcatttatccaacgccatgtgcaaaaatgccttcgcggcggctgtctgccagctatttttccgccgcaacaaaaccgccgttctctccagtagtggcggggcaagagaaatagctttaagcccgtcatgttgtgtggcaatcgctgctggtaacaatgtggaaagggaagtgcggcgaatcagctccagaaccgcgctaattgagttcgcctcaatgaccacctgtggatgtagccccgctttctcgcagtagtggtcaatttgctctctggtggcaaattccgcgctgagcaggaccagtttttcatcatgcaagcgactcaacgccacctgttcatggacggccagcggatgatgttgcgccacgactaacgctaaactttctgtcagtaaaggaattgcctccagctccggcgaatgcacaggcgcgaaggcaatcccaacgtccaactcgtcgcggcaaagcatatcctcgattttctcctgcgacatttcctgtagctggagcgtgatgctgggatagcgcgcatagaaatccgccattaaggggccgataaagtagctcgtaaaggtgggggtgacggcgatacgcagcgatcctcgcgtcagatcggcaacatcatgaatcgcccgtttacccgcccccagttcctgtaacgcccggctggcgtactgtcgccagacttctcctgcatcagtgagacgaatcgttcgcccgctacggtcaaacagcggcacgcctaaactctcctctaactggcgaatctgctgggaaagcgcaggctgggagacgtgcaacgcactggcggcacgggtgaagctgccatgttcagccacggcaagaaaataattgatatgtcgagagagcattcgcaacctataagtaaatccaatggaactcatcataaatgagacttttaccttatgacaatcggcgagtagtctgcctctcattccagagacagacagaggttaacggtgaaagagattattgatggattccttaaattccagcgcgaggcatttccgaagcgggaagccttgtttaaacagctggcgacacagcaaagcccgcgcacactttttatctcctgctccgacagccgtctggtccctgagctggtgacgcaacgtgagcctggcgatctgttcgttattcgcaacgcgggcaatatcgtcccttcctacgggccggaacccggtggcgtttctgcttcggtggagtatgccgtcgctgcgcttcgggtatctgacattgtgatttgtggtcattccaactgtggcgcgatgaccgccattgccagctgtcagtgcatggaccatatgcctgccgtctcccactggctgcgttatgccgattcagcccgcgtcgttaatgaggcgcgcccgcattccgatttaccgtcaaaagctgcggcgatggtacgtgaaaacgtcattgctcagttggctaatttgcaaactcatccatcggtgcgcctggcgctcgaagaggggcggatcgccctgcacggctgggtctacgacattgaaagcggcagcatcgcagcttttgacggcgcaacccgccagtttgtgccactggccgctaatcctcgcgtttgtgccataccgctacgccaaccgaccgcagcgtaaccttatttttaaaccatcaggagttccaccatgattcagtcacaaattaaccgcaatattcgtcttgatcttgccgatgccattttgctcagcaaagctaaaaaagatctctcatttgccgagattgccgacggtaccggtctggcagaagccttcgtaaccgcggctttgctggggcagcaggcgcttcctgccgacgccgcccgcctggtaggggcgaagctggatctcgacgaagacgccattctactgttgcagatgattccactgcgtggctgcattgatgaccgtattccaaccgacccaacgatgtatcgtttctatgaaatgttgcaggtgtacggcacaaccctgaaagcgttggttcatgagaagtttggcgatggcattatcagcgcgattaacttcaaactcgacgttaagaaagtggcggacccggaaggtggcgaacgtgcggtcatcaccttagatggtaaatatctgccgaccaaaccgttctgacagccatgcgtaaccatcaaaagacgttcacgatgctgctggttctggtgctgattggtcttaatatgcgaccactgctcacctccgtcgggccactgctaccgcaattgcgccaggcaagcggaatgagctttagcgtggctgccctgttgaccgctctgccggtggtcaccatgggcgggctggcgctggtcggaagctggcttcatcagcatgtcagcgaacgtcgcagcgtcgccatcagtttattgctgattgccgtcggtgcattgatgcgtgagctttacccccaaagtgcgctgctgcttagcagcgcactgctcggtggggtggggatcggcatcattcaggcggtgatgccttcggtgattaaacggcggtttcagcaacgcacgccactggtgatggggctgtggtccgcggctctgatgggcggcggtgggcttggtgccgccctgacaccctggttagttcaacatagcgaaacttggtatcaaacactcgcctggtgggcgctgcctgccgttgttgcgctctttgcctggtggtggcaaagcacccgcgaggtcgcctcttcccacaagacaacaaccactccggttcgcgtggttttcactcctcgcgcgtggacgctgggtgtttacttcggtctgattaacggtggttacgccagcctgattgcctggttacccaccttctatattgagattggtgccagcgcgcagtacagcggttccttgctggcattgatgacgcttgggcaagccgcaggagctttgctgatgcctgctatggctcgccatcaggatcggcgcaaactgttaatgctggcgctggtgttacaactggtggggttctgcggctttatctggttgccgctgcaattgccggtcttgtgggcgatggtgtgtgggttaggtctgggcggcgcgtttccgctctgtttgctgctggcgctcgatcactctgcgcaaccggctattgctggcaagctggtggcgtttatgcaggggatcggttttatcatcgccgggcttgccccgtggttttctggcgtgctgcgtagtatcagcggcaattacctgatggactgggcatttcatgcgttgtgcgtcgttgggctgatgatcataaccctgcgttttgcaccagcacgttttccgcagctgtgggttaaagaggcatgatgcgacgcttgttcctgcgctttgttcatgccggatgcggccaatgtagatcactgaacttgtaggcctgataagcgaagcgcatcaggcaattttgctaatttaaactgacgattcaactttataatctttgaaataatattgcttatcccggtcgtttatttcgcgaataacccgacaaggaacgccagccgccacgacgtttggtggaatgtcttttgttacgatactacccgcgccaataacagaattatccccgatggtgacgcctggattaataaccacatgacttccgatccagacgttattgccaatcgttatcggaaagagtacatctcgccgttttttctcaattcatggtgtacagggtgtcccgtaacggaaagagtaacgttgggtgcaatcagtacgttatcaccgattgttaccgtgtagtcatcgacaatggttaaattgaaatttgcataaaaattgcggcctatatggatgttggaaccgtaagagaaatagacaggtggttctatccaggcgttttcccctaccgtggcaaacatttctttaagcaggctttcccttttttcaacttctgatggatgcgagtgattaaactcatacattaacgttttcccacgaagtcttttttcaggtaagccttcgcacatatcggtaaatagcttgcctgcttttattctttctgtcatcgacatgttcattgcgatcattccgtcctgatatgttggtcggataaggcgctcgcgccgcatccgacattgattgcttaagcgacttcattcacctgacgacgcagtagagaaagcgggccggggccgctaagcgtgaacacggaaattaaggtgaagcccagcgccaccagacccagcaccagataagcgccctggaagccgatgctttcatacatattgcccgccagtacagacataaaaatcatcgccagttgcttaaagaagcagaaacagaccagataaatcgtcgctgaaaaacgcacttcaaactggctggtaatatatttaaagcagcctaccagcaggaacggtacttcaaacatatgcagcgttttcagaataactacttccagcgctgaggtggcgaacgatgagccaataatacgtacagacataatagtgccagccagcagcagggcgtttttcccaccgatgcgattaatgatcagtggcgcaaagaacataatcgaggcgttaagtaattcgcccattgtcgttacgtagccaaatacccgcgtaccctgttcaccggtagcaaagaacgaagtaaagaaattagcaaactgttggtcaaaaacatcgtaggtgcaggaaacgccaataacatacagtgacaaaaaccacagttttggctgtctgaacagttccagcgccagcttaaggctaaatgccgaatggttggcacctaccgcattggcaaccgtggcagaagagggcgcatccgttttggcgaaaaagagtaaaacggcgaggatgagtgcacagccagaacccagccagaaaacaaactgattattgatggtgaacatgatgccgacaatcgaggcacacagcgcccagccaacacagccaaacatccgcgcgcgaccaaattcgaaattactgcgacggctgactttctcgataaatgcctctactgctggcgcaccggcgttaaaacaaaagcctagataaataccaccaacaatcgatcctactaaaatgttgtattgtaacagtggcccgaagataaaaataaagaacggcgcaaacatcactaacatgccggtaataatccacagcaggtatttgcgcagcccgagtttgtcagaaagcagaccaaacagcggttggaataatagcgagaacagagaaatagcggcaaaaataatacccgtatcacttttgctgatatggttgatgtcatgtagccaaattgggaaaaacgggaagtaggctcccatgataaaaaagtaaaagaaaaagaataaaccgaacatccaaaagtttgtgttttttaaatagtacataatggatttccttacgcgaaatacgggcagacatggcctgcccggttattattatttttgacaccagaccaactggtaatggtagcgaccggcgctcagctggaattccgccgatactgacgggctccaggagtcgtcgccaccaatccccatatggaaaccgtcgatattcagccatgtgccttcttccgcgtgcagcagatggcgatggctggtttccatcagttgttgttggctgtagcggctgatgttgaactggaagtcgccgcgccactggtgtgggccataattcaattcgcgcgtcccgcagcgcagaccgttttcgctcgggaagacgtacggggtatacatgtctgacaatggcagatcccagcggtcaaaacaggcggcagtaaggcggtcgggatagttttcttgcggccctaatccgagccagtttacccgctctgctacctgcgccagctggcaggtcaggccaatccgcgccggatgtggcgtattgctcgctacttcaacatcaacggtaatcgccatttgaccactaccatcaatccggtaggttttccggctaataaataaggtttttccctgatgctgccatgcgtggacagtggtaatcagcaccgcgtcggcaagtgtatctgccgtgcactgcaacaacgccgcttcggcctggtaatggcccgccgccttccagcgttcgacccaggcgttagggtcaatgcgggtcgcttcacttacgccaatgtcgttatccagcggtgcacgggtgaactgatcgcgcagcggcgtcagcagttgtttttcatcgccaatccacatctgtgaaagaaagcctgactggcggttaaattgccaacgcttattatccagctcgatgcaaaaatccgtttcgctggtggtcagttgcgggatggcgtggggcgcggaggggagtgtcacgctgaggttttccgccagtcgccactgttgccaggcgctgatgtgtccggcttctgaccatgcggtcgcgttcggttgtactacgcgtactgtgagccagagttgcccggtgctctccagtcgcggtagttcaggcaattcaattacctgtttaccttgtggagcgacattcataggtacttcaccgcttgccagcggcttgccatccagcgccaccatccagtgcaggagctcgttatcgctatgacggaacaggtattcgctggtcacttcgatggtttgcccggataaacggaactggaaaaactgctgctggtgttttgcttccgtcagcgctggatgcggcgtgcggtcggcaaagaccagaccgttcatgcagaactggcgatcgttcggcgtatcgccaaaatcaccgccgtaagccgaccacggattgccattttcatcatatttaatcagcgactgatccacccagtcccagacgaagccgccctgtaaacggggatactgacgaaacgcctgccagtatttagcgaaaccgccaagactgttacccattgcgtgggcatattcgcaaaggatcagtgggcgcagttctccaggcaacgaaagccattttttgatggaccatttcggcaccgccgggaagggctggtcttcatccacgcgcgcgtacatcgggcaaataatatcggtggccgtggtgtcggctccgccgccttcatactgcaccgggcgggaaggatcgacagatttgatccagcgatacagcgcgtcgtgattagcaccgtggcctgattcattccccagcgaccagatgatcacactcgggtgattacgatcgcgctgcaccattcgcgttacgcgttcgctcatcgccggtagccagcgcggatcatcggtcagacgattcattggcaccatgccgtgggtttcaatattggcttcatccaccacatacaggccgtagcggtcgcacagcgtgtaccacagcggatggttcggataatgcgaacagcgcacggcgttaaagttgttctgcttcatcagcaggatatcctgcaccatcgtctgctcatccatgacctgaccatgcagaggatgatgctcgtgacggttaacgcctcgaatcagcaacggcttgccgttcagcagcagcagaccattttcaatccgcacctcgcggaaaccgacatcgcaggcttctgcttcaatcagcgtgccgtcggcggtgtgcagttcaaccaccgcacgatagagattcgggatttcggcgctccacagtttcgggttttcgacgttcagacgtagtgtgacgcgatcggcataaccaccacgctcatcgataatttcaccgccgaaaggcgcggtgccgctggcgacctgcgtttcaccctgccataaagaaactgttacccgtaggtagtcacgcaactcgccgcacatctgaacttcagcctccagtacagcgcggctgaaatcatcattaaagcgagtggcaacatggaaatcgctgatttgtgtagtcggtttatgcagcaacgagacgtcacggaaaatgccgctcatccgccacatatcctgatcttccagataactgccgtcactccagcgcagcaccatcaccgcgaggcggttttctccggcgcgtaaaaatgcgctcaggtcaaattcagacggcaaacgactgtcctggccgtaaccgacccagcgcccgttgcaccacagatgaaacgccgagttaacgccatcaaaaataattcgcgtctggccttcctgtagccagctttcatcaacattaaatgtgagcgagtaacaacccgtcggattctccgtgggaacaaacggcggattgaccgtaatgggataggtcacgttggtgtagatgggcgcatcgtaaccgtgcatctgccagtttgaggggacgacgacagtatcggcctcaggaagatcgcactccagccagctttccggcaccgcttctggtgccggaaaccaggcaaagcgccattcgccattcaggctgcgcaactgttgggaagggcgatcggtgcgggcctcttcgctattacgccagctggcgaaagggggatgtgctgcaaggcgattaagttgggtaacgccagggttttcccagtcacgacgttgtaaaacgacggccagtgaatccgtaatcatggtcatagctgtttcctgtgtgaaattgttatccgctcacaatttcacacaacatacgagccggaagcataaagtgtaaagcctggggtgcctaatgagtgagctaactcacattaattgcgttgcgctcactgcccgctttccagtcgggaaacctgtcgtgccagctgcattaatgaatcggccaacgcgcggggagaggcggtttgcgtattgggcgccagggtggtttttcttttcaccagtgagacgggcaacagctgattgcccttcaccgcctggccctgagagagttgcagcaagcggtccacgctggtttgccccagcaggcgaaaatcctgtttgatggtggttaacggcgggatataacatgagctgtcttcggtatcgtcgtatcccactaccgagatatccgcaccaacgcgcagcccggactcggtaatggcgcgcattgcgcccagcgccatctgatcgttggcaaccagcatcgcagtgggaacgatgccctcattcagcatttgcatggtttgttgaaaaccggacatggcactccagtcgccttcccgttccgctatcggctgaatttgattgcgagtgagatatttatgccagcctgccagacgcagacgcgccgagacagaacttaatgggcccgctaacagcgcgatttgctggtgacccaatgcgaccagatgctccacgcccagtcgcgtaccgtcttcatgggagaaaataatactgttgatgggtgtctggtcagagacatcaagaaataacgccggaacattagtgcaggcagcttccacagcaatggcatcctggtcatccagcggatagttaatgatcagcccactgacgcgttgcgcgagaagattgtgcaccgccgctttacaggcttcgacgccgcttcgttctaccatcgacaccaccacgctggcacccagttgatcggcgcgagatttaatcgccgcgacaatttgcgacggcgcgtgcagggccagactggaggtggcaacgccaatcagcaacgactgtttgcccgccagttgttgtgccacgcggttgggaatgtaattcagctccgccatcgccgcttccactttttcccgcgttttcgcagaaacgtggctggcctggttcaccacgcgggaaacggtctgataagagacaccggcatactctgcgacatcgtatagcgttactggtttcacattcaccaccctgaattgactctcttccgggcgctatcatgccataccgcgaaaggttttgcgccattcgatggtgtcaacgtaaatgcacgccgcttcgccttccggctaccagaatagcctgcgattcaaccccttcttcgatctgttttgctacccgttgtagcgccggaagatgcttttccgcggcctgttcaatggtcattgcgctcgccatatacaccagattcagacagccaatcacccgttgttcactgcgcagcggtacggcgatagaggcgatcttctcctcctgatcccagccgcggtagttctgtccgtaaccctctttgcgcgcgcgcgccagaatggcttgcagctttaacggttctcgtgccagttgatagtcatcaccggggcgggaggctaacatctcgattaattccttgcgttcttgttccgggcaaaaggccagccaggtcaggcccgaggcggttttcagaagcggcaaacgtcgcccgaccattgcccggtgaaaagataagcggctgaaacggtgggtggtttcgcgtaccaccattgcatcaacatccagcgtggacacatctgtcggccataccacttcgcgcaacagatcgcccagcagtggggccgccagtgcagaaatccactgttcgtcacgaaatccttcgcttaattgccgcactttgatggtcagacgaaaactgtcatcggaggggctacggcggacatatccctcttcctgcagcgtctccagcagtcgccgcacagtggtgcgatgcaggccgctgagttccgccagcagcccgacgctggcaccgccatcaagtttatttaacatatttaataacattagaccgcgggttaagccgcgcacggttttgtattccgtctgctcattgttctgcatattaattgacatttctatagttaaaacaacgttgtgcacctggtgcacattcgagcatgttttgattgtagccgaaaacacccttcctatactgagcgcacaataaaaaatcatttacatgtttttaacaaaataagttgcgctgtactgtgcgcgcaacggcattttgtccgagtcgtgaggtactgaaatggcaatacaacaccctgacatccagcctgctgttaaccatagcgttcaggtggcgatcgctggtgccggcccggttgggctgatgatggcgaactatctcggccagatgggcattgacgtgctggtggtggagaaactcgataagttgatcgactacccgcgtgcgattggtattgatgacgaggcgctgcgcaccatgcagtcggtcggcctggtcgatgatgttctgccgcacactacgccgtggcacgcgatgcgttttctcaccccgaaaggccgctgttttgctgatattcagccaatgaccgatgaatttggctggccgcgccgtaacgcctttattcagccgcaggtcgatgcggtgatgctggaaggggtgtcgcgttttccgaatgtgcgctgcttgttttcccgcgagctggaggccttcagtcagcaagatgacgaagtgaccttgcacctgaaaacggcagaagggcagcgggaaatagtcaaagcccagtggctggtggcctgtgatggtggggcaagttttgtccgtcgcaccctgaatgtgccgtttgaaggtaaaactgcgccaaatcagtggattgtggtagatatcgccaacgatccgttaagtacgccgcatatctatttgtgttgcgatccggtgcgcccgtatgtttctgccgcgctacctcatgcggtacgtcgctttgaatttatggtgatgccaggagaaaccgaagaacagctgcgtgagccgcaaaatatgcgcaagctgttaagcaaagtgctgcctaatccggacaatgttgaattgattcgccagcgtgtctacacccacaacgcgcgactggcgcaacgtttccgtattgatcgcgtactgctggcgggcgatgccgcgcacatcatgccggtgtggcaggggcagggctataacagtggtatgcgcgacgcctttaacctcgcatggaaactggcgttggttatccaggggaaagcccgcgatgcgctgctcaatacctatcaacaagaacgtcgcgatcacgccaaagcgatgattgacctgtccgtgacggcgggcaacgtgctggctccaccgaaacgctggcagggtacgttacgtgacggcgtttcctggctgctgaattatctgccgccagtaaaacgctacttcctcgaaatgcgcttcaagccgatgccgcaatattacggcggtgcgctggtacgtgagggcgaagcgaagcactctccggtcggcaagatgtttattcagccgaaagtcacgctggaaaacggcgacgtgacgctgctcgataacgcgatcggcgcgaacttcgcggtaattggctggggatgcaatccactgtgggggatgagcgacgagcaaatccagcagtggcgcgcgttgggcacacgctttattcaggtggtgccggaagtgcaaattcatacggcacaggataaccacgacggcgtgctacgcgtgggcgatacgcaaggtcgtctgcgtagctggttcgcacaacacaatgcttcgctggtggtgatgcgcccggatcgctttgttgccgccaccgccattccgcaaaccctgggcaagaccctgaataaactggcgtcggtgatgacgctgacccgccctgatgccgacgtttctgtcgaaaaggtagcctgatatgcacgcttatcttcattgtctttcccactcgccgctggtggggtatgtcgacccggcacaagaggtactcgatgaggtcaatggcgtgattgccagcgcccgcgagcgtattgcggcattctcccctgaactggtggtgctgtttgcgccagatcactacaacggctttttctatgacgtgatgccaccgttctgtttaggcgttggagcgacggcaattggtgatttcggcagtgcggcaggagagctgcccgtgcctgtggagctggcggaggcctgtgcgcatgccgtcatgaagagcgggatcgatcttgccgtttcttactgtatgcaggtggaccacgggttcgcccagccgctggagttcctgctcggtgggctggataaggtgccagttctgcctgtgttcatcaacggtgtcgccacgccgctgcccggtttccagcgtacccgcatgttgggtgaagccattggacgtttcaccagcactctcaataaacgcgtgctgttcctgggttccggtgggctttcccatcagccgccggtgcccgaactggcgaaagccgatgcccatatgcgcgaccgtctgttggggagcgggaaagatttacccgccagtgagcgcgaattgcgtcagcaacgggtgattagcgccgctgagaagtttgttgaggatcagagaacgctgcatccgctcaacccgatttgggataaccagttcatgactttgctggagcagggacgcatacaggaactggatgccgtcagtaacgaagagctttccgccattgccggaaagtcgacacatgaaatcaaaacctgggtcgccgcttttgccgctatttctgcgtttggcaactggcgtagcgaagggcgttattaccgcccaatcccggagtggattgccggatttggctcgttaagcgccagaacagagaactgaatatgcaggagaagatgatgagttatcagccacaaaccgaagccgccaccagccgttttctgaatgtagaagaagcgggtaaaacgctgcgcatccattttaatgactgcggacaaggcgacgaaaccgttgtcctgctgcatggttccggcccgggtgctactggctgggcgaacttcagccgcaatatcgatccgctggtagaggcgggctatcgggtgatcctgctggattgtccgggttggggcaagagcgattcgatcgttaatagtggttcgcgatcggatcttaatgcacgaatcctgaaaagcgtggtggatcaactggatatcgccaaaatccacctgctgggcaactcgatggggggccatagttctgtggcgttcacccttaaatggccggagcgcgtcggcaaactggtgctgatgggcggcggtacgggcggcatgagtttgtttacgccgatgccaaccgaaggtattaagcgactgaatcagctttatcgtcagccgactatcgaaaacctgaagctgatgatggatatcttcgtttttgataccagcgatttgaccgacgccctgtttgaagcgcgcctgaataatatgctgtcgcgccgcgatcacctggaaaactttgttaagagcctggaagccaatccgaaacagttcccggattttggcccacgtctggcggaaatcaaagcgcaaaccctgattgtctgggggcgcaacgaccgctttgtgccgatggatgcgggtctgcgtctgctgtccggcattgccggttctgaactgcatatcttccgcgactgtggtcactgggcgcagtgggaacatgccgacgctttcaatcaactggtgctgaatttcctcgcacgcccttaaggaatggtcatgacgaagcatactcttgagcaactggcggcggatttacgccgcgccgcagagcagggcgaagcgattgcaccgctgcgcgatctgattggtatcgataacgctgaagcggcttacgccattcagcacataaatgtgcaacatgacgttgcgcaggggcgtcgcgtggtagggcgtaaagtgggcctgacacatccgaaagtgcaacaacaactgggcgttgatcaaccggattttgggacgttatttgccgacatgtgttatggcgataacgaaatcattcctttttcccgtgttctgcaaccccgcattgaagcggagatcgcactggtgttgaaccgcgatttgcccgcaaccgatatcaccttcgacgaattgtataacgccattgaatgggtacttccggcgctggaagtggtggggagccgcattcgcgactggtcgattcagtttgtcgataccgtggcagataacgcctcctgtggggtgtatgtcatcggcggtccggcgcaacgtccggcggggttagacctgaaaaactgcgccatgaagatgacgcgtaataacgaagaggtttctagcgggcgcggcagcgaatgcctgggacatccgcttaatgcggccgtctggctggcacgcaaaatggccagtctgggtgaaccgctgcgcaccggagatatcattcttaccggggcattaggtccgatggtggcggtgaatgcgggcgatcgttttgaagcccatattgaaggcataggttcagttgctgcgacattttcaagcgcagccccaaaaggaagtctgtcatgagtaagcgtaaagtcgccattatcggttctggcaacattggtaccgatctgatgattaaaattttgcgtcacggtcagcatctggagatggcggtgatggttggcattgatcctcagtccgacggtctggcgcgcgccagacgtatgggcgtcgccaccacccatgaaggggtgatcggactgatgaacatgcctgaatttgctgatatcgacattgtatttgatgcgaccagcgccggtgctcatgtgaaaaacgatgccgctttacgcgaagcgaaaccggatattcgcttaattgacctgacgcctgctgccatcggcccttactgcgtgccggtggttaacctcgaggcgaacgtcgatcaactgaacgtcaacatggtcacctgcggcggccaggccaccattccaatggtggcggcagtttcacgcgtggcgcgtgttcattacgccgaaattatcgcttctatcgccagtaaatctgccggacctggcacgcgtgccaatatcgatgaatttacggaaaccacttcccgagccattgaagtggtgggcggcgcggcaaaagggaaggcgattattgtgcttaacccagcagagccaccgttgatgatgcgtgacacggtgtatgtattgagcgacgaagcttcacaagatgatatcgaagcctcaatcaatgaaatggctgaggcggtgcaggcttacgtaccgggttatcgcctgaaacagcgcgtgcagtttgaagttatcccgcaggataaaccggtcaatttaccgggcgtggggcaattctccggactgaaaacagcggtctggctggaagtcgaaggcgcagcgcattatctgcctgcctatgcgggcaacctcgacattatgacttccagtgcgctggcgacagcggaaaaaatggcccagtcactggcgcgcaaggcaggagaagcggcatgaacggtaaaaaactttatatctcggacgtcacattgcgtgacggtatgcacgccattcgtcatcagtattcgctggaaaacgttcgccagattgccaaagcactggacgatgcccgcgtggattcgattgaagtggcccacggcgacggtttgcaaggttccagctttaactatggtttcggcgcacatagcgaccttgaatggattgaagcggcggcggatgtggtgaagcacgccaaaatcgcgacgttgttgctgccaggaatcggcactattcacgatctgaaaaatgcctggcaggctggcgcgcgggtggttcgtgtggcaacgcactgtaccgaagctgatgtttccgcccagcatattcagtatgcccgcgagctcggaatggacaccgttggttttctgatgatgagccatatgaccacgccggagaatctcgccaagcaggcaaagctgatggaaggctacggtgcgacctgtatttatgtggtggattctggcggtgcgatgaacatgagcgatatccgtgaccgtttccgcgccctgaaagcagagctgaaaccagaaacgcaaactggcatgcacgctcaccataacctgagtcttggcgtggcgaactctatcgcggcggtggaagagggctgcgaccgaatcgacgccagcctcgcgggaatgggcgcgggcgcaggtaacgcaccgctggaagtgtttattgccgccgcggataaactgggctggcagcatgggaccgatctctatgcgttaatggatgccgccgacgacctggtgcgtccgttgcaggatcgaccggtacgagtcgatcgcgaaacgctggcgctgggatacgctggtgtttactcgagcttcctgcgtcactgtgaaacggcggcggcgcgttatggcttaagtgcggtggatattctcgttgagctgggcaaacgccggatggttggcggccaggaggatatgatcgttgacgtggcgctggatctgcgcaacaacaaataatgatgactgccgagaacgtgcattttgtatgcccatcccagcacgactgccggatgcggcgtgaacgccttatccggcctacggatggcgtgagaatttgtaggtctgataagacgcgttagcgtcgcatcaggcatctgcgcacgactgccggatgcggcgtaaacgccttatccggcctacggatggcgcgggaatttgtaggcctgataagacgcgttagcgtcgcatcaggcatctgcacacgactgccggatgcgataaacgtcttgtccggcctacatttcgcccgtaggcagtcattaaatagttctgattacgcggctggcaatgtatcagtcgcgattcacctgcactcgcaacgaggttcatcttatgtcgactcgtaccccttcatcatcttcatcccgcctgatgctgaccatcgggctttgttttttggtcgctctgatggaagggctggatcttcaggcggctggcattgcggcgggtggcatcgcccaggctttcgcactcgataaaatgcaaatgggctggatatttagcgccggaatactcggtttgctacccggcgcgttggttggcggaatgctggcggaccgttatggtcgcaagcgcattttgattggctcagttgcgctgtttggtttgttctcactggcaacggcgattgcctgggatttcccctcactggtctttgcgcggctgatgaccggtgtcgggctgggggcggcgttgccgaatcttatcgccctgacgtctgaagccgcgggtccacgttttcgtgggacggcagtgagcctgatgtattgcggtgttcccattggcgcggcgctggcggcgacactgggtttcgcgggggcaaacttagcatggcaaacggtgttttgggtaggtggtgtggtgccgttgattctggtgccgctattaatgcgctggctgccggagtcggcggttttcgctggcgaaaaacagtctgcgccaccactgcgtgccttatttgcgccagaaacggcaaccgcgacgctgctgctgtggttgtgttatttcttcactctgctggtggtctacatgttgatcaactggctaccgctacttttggtggagcaaggattccagccatcgcaggcggcaggggtgatgtttgccctgcaaatgggggcggcaagcgggacgttaatgttgggcgcattgatggataagctgcgtccagtaaccatgtcgctactgatttatagcggcatgttagcttcgctgctggcgcttggaacggtgtcgtcatttaacggtatgttgctggcgggatttgtcgcggggttgtttgcgacaggtgggcaaagcgttttgtatgccctggcaccgttgttttacagttcgcagatccgcgcaacaggtgtgggaacagccgtggcggtagggcgtctgggggctatgagcggtccgttactggccgggaaaatgctggcattaggcactggcacggtcggcgtaatggccgcttctgcaccgggtattcttgttgctgggttggcggtgtttattttgatgagccggagatcacgaatacagccgtgcgccgatgcctgacgtgccttattaggcaggggcgaaagggacttcaccccaatacacctacggcgtttacaggtatactcgctaaaaattattcagcgggtttggaaacaaagatggcaaaacttaccttacaagagcagttgctcaaagcaggattagtcaccagcaaaaaagcggcgaaggtggagagaacggcgaaaaaatcgcgcgttcaggcgcgtgaagctcgggcggcggtagaagaaaataaaaaggcacagcttgagcgtgataaacagcttagcgaacagcaaaaacaagcggcgttggcgaaagaatataaagctcaggtgaagcagcttattgaaatgaaccgaatcaccattgccaatggcgatattggttttaacttcactgacggcaatctgattaagaagatttttgtcgataagctcacacaggcgcagttgattaatggtcgtctggcgattgcccgcttgttggtcgataacaatagcgaaggtgaatacgccattattcccgccagcgttgccgataaaattgctcagcgcgatgccagcagtatagtgttgcacagcgcgctcagcgccgaagagcaggatgaagacgacccgtatgccgacttcaaagtgcctgatgatttgatgtggtaaacatagataagtcgtgcgcagatgcctgatgcgacgctatgcgcgtcttatcaggcctacggtttatgggcgaagtgtagaccggataaggcgttcacgccgcatccggcagtcgtgcgccatgcctgatgcgacgctttgcgcgtcttatcaggcctacggcttacgggcgaagtgtaggccggataaggcgttcacgccgcatccggcagtcgtgctattatcaacgcatattcagtttattggcgtggtaggcaatatgctcgccaataaaactggagacaaaataatagctgtgatcataaccctcgtgataacggattaacgtcttgatattcatctcctggcagatcttttcaagatttggagtccgcagctgttctgcgtaaaaatcatcactcaacccctgatcaaccatgatttccgcaacgcgttgaccttgtgaaataagactcaccgggtcgtaatccaaccaggcatctttattttcagcaagatatgcagcaaaggcttggtccccacggcacttgcgatggggagacaatgggcgaaaacgccgagacgctgacatattcatctgggttacgtaacgccagcaccagcgcgcccagcccgcccatagaatgaccagagatagactttttggccgttgccggaaaatgatgcatcactaaatccggcagctcgttgcggatatagtcatacattttgtaatgttcattccacggcgcttgcgtcgcgttcaggtaaaacccggcaccttgcccgagatcgtaacggtcagcatctgcgacatgactgcctcgcggactggtgtccggcgcaacaacaataatgttgtgctcagccgcgtaacgctgcatccccgatttagtaatgaaattctgctcgttgcaggtcaggcctgaaagccagtacagcaccggcaatttttcattcgcggcttttggtgggagatagacgccgacattcatttcacatttcagtgattgggaataatgccgatacacattttgccagccgccaaagctggcatgtttttcaatgagttccatcagtcattatctcacggttaatcccccggacggctgcccagggagagtattaagaaccccgtctgaagtggacggggtatacctgcgggaaatcagtaacgaattacggttcgaatggatttgccttcatgcatcagatcgaaggcgtcattaatttcatcaaggctcatggtatgcgtgacaaacggttccagatcgatatcacctttcatcgcatcttcaaccatacccggtaactgggaacgacctttcacgccgccaaacgcggaacctttccatacgcgaccagtgaccaactggaatggacgggtggagatttcctgaccagaacctgccaccccgatgatcaccgactgaccccagccgcggtgtgcactttccagcgccgcacgcatcacgttgacgttaccgatgcattcaaaggtatggtcgataccccatttgttgatatccagcaggacatctttaatcggtttgtcgtagtcattcgggttaatgcagtcggtagcaccgaagcgacgagccagatcgaatttcttcgggttggtatcgatagcgataatccgtcccgctttcgcctgacgcgcgccctgaaccactgccagaccaatcgcgccaagaccaaacacggcaacagaatcacctggctggactttagctgtgttgtgcaccgcgccaataccggtggtcacgccacagcccagcaggcagacgtgttcatggtttgcttctggattaattttggccagagacacttccgcgaccacggtgtattcactgaatgttgagcatcccatgtagtgataaagcggctgcccgttgtaagaaaaacgggtggtgccgtctggcatcaagcctttaccctgggtttcgcgaaccgcaacacagaggttagttttgccagaacgacagaactcacactcgccgcactccgcggtgtaaagcgggatcacatggtcgccaggtttgacgctggttacgccttcaccgacttcaaccacaacgccggccccttcgtgaccgagaaccaccgggaatacaccttccgggtcatccccggagagggtaaatgcgtcggtatggcaaacgccggtatgggtgactttaatcagcacttcaccttttttcggtggtgcaacgtcaatttcaacgatttccagcggtttaccgggagcaaatgcaacggcagcacgtgatttcatctctcgctcttcctcaatatggtaatagattcagctatttaagataggctcgaaccagttcaatagtgtcgtcaacggattggctgacttcgcggctgtagcagtcatttcggtcaaacgtttcccggatatggctttcaagcacttctgccatcagcccattagccgcgccccgaacggcagcgatctgttggagtatggcacggcattcggcatcaccctccagcgaccgttccagagcatcaatctgccctcgaatacgacgaactcgagtaaggacctttttcttctcttccggagtactgggcatttcgcacctcattatctgcacgcaatatactataggggggtatgctatatgtcaatgcatacccccctatagtatataatactggagaataaaatttatccggtgaatgtggtcggaaaacaaagaggaaaggggggggctaatcggcagggaaggccgccccggatagcgggcggcagaaggaatcagaatttccaggtcagatgggctgcaagttgcagaccgttataatcatcggttggggtgtcgtaccacactttacctgccgtcagcccgagattaagttgctcagtcagcggttgaatacgttgcagactgacgctcttcatgctgccgtagcgtgtttctggcgtccagtcataggtgtaagcacctgttccgcggcttagccatagttgcgtataaccagtgccgcgcgggtcattcagacgcacggaaatcatattgctataactaccacctgcatcgctggagtcataatgggtatagcggtagctggtgatcaccgggccagtatagagtgatacgccgccttgccaggcatcgacttcgacatcatcgtaatatttagtgtagcgataaccggtcgtgaaaagcgtttttggcaacagggccaggttaatatcctgacgaaaatcctggcgggcaaagaccggcgtattatccgcaaaggcaatacccgttcgggttgtcagccagttattccatttataccagaccgcaccctgaccgcgagtggcattgaaatgttcagtttcataatcacgacgcccctgggaaagattaaaaagcagcgttgcgttttcaactttcgccaccagttcagcatacgctaaattacggttgccatgatcgccagaataatcggtaaaatcgtagcccgcggtaatggaagttaacccggcataagcgggcaatgcgcttaaaatggccgctgctaataacgtccgttttatcattttaatctcctgtacggataagttcttgtcggagtgaataagttccggtaggtaaattacgttctacaatcacgcgcgggccaagttgcgtgttcggggaaataattcgcccaggcaaaataataacttgtacgccaaggcgtgaacgctgcccgatataacaacctaatttatcgcatccggtagcgataattccctctggagttcgaacagacacgggctgttcatccagacgatgattactggtacgtacttgtgcgcccaaatatgcctggtttgcaactaccgagtcggcaataaagcattgcggaccaatcgttgcttccgcttcaataaccgcatttttaatttcggtggcaaaaccaatttttacaccattgctgattattgtgccaggacgaataaacgcataattacctatcaggcagtttgcgccaatcactaccggaccctgaataacggcaccatgacaaatacgggtattcgcgccgataacaacttcacctgcagtttcatcaataattacctggtctgcaatctgaatatttttctctttaacattaagcttcagatagtttttcagttcctgtgacagaaggttgggaataagcggttgacgcttccaccagtgcggaatagcgggtgggtttgtcgcgctgaggttcgcgtccagtaaaaaaggcaataagtccataaataatccagatggcataagctaataatacatacacaacggaaagcggcgctaaaggcaccaacaaccagcaacgatgaaaccaggcgctaaaagcaccaataacacaaactacgccgacccagataagcggaaacattgccaacaccacaccatgcggcccggtggtgatgaattcattaaaccaggtagtgagataaatcccaacgccataaagcacaaccaacagcataggaaatatactgaagataccgaaacggctaaataaaagccttttatgcaggcgcatacagaccgcgtagcccacaatccaacgccgccaacgacgccactcctcacgcgggctgttgcattcctgtggatatacgatgcagcgattcgcctgccgaatacggtagccgtttgccaccaatgtccaggtgagatcaaggtcttcgactttagtacgatccgagaaaccgaacttacgcaatacatcagtacggaacatcccgcaggcaccgctgataataaacggtgcgccgcccaggagctgctgtagcgtgcgcttcataacaatcatcggcaactttacggtcgcgcggatgtgcggtaacagccccgcgcctttcaacgcagtagagggaatgccgcctacggcatcagcaccgcgctcaatttctgccagcatatagcccattccgtcttgatcgggcggaacataggtgtcggcatcacttaaaaaaacctggtcgcaggtggcgtaattgaggccattcatcagcgcaccacctttaccggtatttttttgcgtgacggcaacaaagcggtcgccccatttgcgtttgacttccgccatgaccgcttcggtattgtccgtggagccgtcgttaacgcaaattacccggcaaaaataagggttacgcagtagattatccagtgactgcgccagacacgggccttcgttatacgcaggtataatggcgtcaatacagcctttgttttgactgggtttacgtcttagcgtacttaaaaaccatagcaacattgctatggacatacagataaatatccaggttttcatgcaatttgctcaaagaatcattttatgaattacaaagccttcacccagatcgctattgacctgttgcccgcgaaattgtgcaactgcacgcaggcgatcatgacgcatataatcacgtcgttcctggcttttatgtttttttaatgcagcaagtttgactgtgaaatattcttctttaacggattcaaaaacctgaggcataaatgaaagccaggtacttggggtttcgtagccgagaatttgcggaatagttcggcaggcaaccattgaagcttgataaacagcaagatgatcctgatggcggtcggcatcatgcatggtatatacccgcatgatttcaacatcagaaggaatttgatttttaatgatgtcttccagggcggaaatcatatcattgagctgtaaatgagcgcgggtgtcagcaaaattaagatgaatagtttggtggcaccctaatatctttagggcgttgcgcgattcttcatggcgatcgattattccatctgtgccagagttgccggtagtcatcaccacggctgcgatataaattcctttttgcgcaagacgagcaagcgatgcgccacagcctaattctatatcgtcaggatgtgcgccaatagcaaggataccctttcttttatttgccgaagaaaggagggctgaatctaaaaccttatccacttaatgacactccattttatttattatactacaagcacaacgatgcactcagagacgtaatctctggcgcagccagatgttaatttataaatgttaaatgttgctaataactgaaaagcaagggctttcagacccgcgggttcgactgggtaatgtttctatgcaattcatatgttaagtgtttgtatgtttggtatgtatagttattttgttttatacattgtatttagatgtgatttagtttgtcaattaattgcatttaaaaaatatgttctgtgaacaagcattgtttatatacattatgtgaatgtaatatgcgagtgattgagaatgatacagtgatatatacaatgcgaatataatagttttattatatgtattgatattgatagaaataatgaagtaataaatctcgtaatgtggttgtttatgcatcactaaaatgaagtgtagtaattttcccaattgttagaacggagtaattgcatatttaatctttcctttgccgtttttttgctaagaataaaatcatctgtgcgataacgactaattcttttaatgaatgtttttattcctgaatactgctcccataacaagacaggggagcagacaatcatggcactttcatcgcgtaacacacttctagccgcactggcattcatcgcttttcaggcacaggcggtgaacgtcaccgtggcctatcaaacctcagccgaaccggcgaaagtggctcaggccgacaacacctttgctaaagagagcggggcgagcgtggactggcgtaagtttgacagcggagccagcatcgtgcgggcgctggcttcaggcgacgtgcaaatcggcaacctcggttccagcccgttagcggttgcagccagccaataggtgccgattgaagtcttcttgctggcgtcaaaactgggtaactccgaagcgctggtggtaaagaaaactatcagcaaaccggaagatctgattggcaaacgcatcgccgtgccgtttatctccaccacccactacagcctgctggcggcgctgaaacactggggaattaaaccagggcaagtggagattgtgaacctgcagccgcccgcgattatcgccgcatggcagcggggagatattgatggtgcttatgtctgggcaccggcggttaacgccctggaaaaagacggcaaggtgctgaccgattcggaacaggtcgggcagtggggcgcgccgacactggacgtctgggtggtgcgcaaagattttgccgagaaacatcctgaggtcgtgaaagcgttcgccaaaagcgccatcgatgctcagcaaccgtacattgctaacccagacgcgtggctgaaacagccggaaaacatcagcaaactggcgcggttaagcggcgtgcctgaaggtgacgttccggggctggtgaaggggaatacctatctgacgccgcagcaacaaacggcagaactgaccggaccggtgaacaaagcgatcatcgacaccgcgcagtttttgaaagagcagggcaaggtcccggctgtagcgaatgattacagccagtacgttacctcgcgcttcgtgcaataaaaggaggcgcagatgctgcaaatctctcatctttacgccaattatggtggcaaaccggcactggaagatatcaacctgacgctggaaagcggtgagctactggtggtgctggggccgtccggctgcggtaaaaccaccctgctgaatctgattgccggttttgtgccttatcagcacggcagcattcaactggcgggtaagcgtattgaggggccgggagcagagcgcggcgtggtttttcagaatgaagggctgctaccgtggcgcaatgtccagaacaacgtggcgttcggcctgcaactggcaggtatagagaaaatgcagcgactggaaatcgcgcaccagatgctgaaaaaagtggggctggaaggagcagaaaaacgctacatctggcagctctccggcggtcaacgtcagcgggtgggcattgctcgcgcgctggcggcaaatccccagctgttattactcgacgaaccgtttggtgcgctggatgccttcacccgcgaccagatgcaaaccctgctgctgaaactctggcaggagacgggcaagcaggtgctgttgattacccacgatatagaagaagcggtgtttatggcgactgaactggttctgctttcacccggccctggccgcgtgctggagcggctgccgctcaactttgctcgccgctttgttgcgggagagtcgagccgcagcatcaagtccgatccacaattcatcgccatgcgcgaatatgttttaagccgcgtatttgagcagcgggaggcgttctcatgagtgtgctcattaatgaaaaactgcattcgcatcggctgaaatggcgctggccgctctcgcgtcaggtgaccttaagcattggcacgttagcggttttgctcactgtatggtgggcagttgcagcgctgcaactgattagcccgctgtttttgccgccaccgcaacaggtactggcaaaactgctcaccattgccgggccgcagggatttatggacgccacgctgtggcagcatctggccgccagcctgacgcgcattgtgctggcgctactcgcggcggtggtaatcggtattccggtcgggatcgccatggggctaagcccgacggtgcgcggcattctggatccgataatcgagctttatcgtccggtgccaccgctggcttatttgccgctgatggtgatttggtttggtattggcgaaacctcgaagatcttactgatctatttagcgatttttgcgccggtggcaatgtcggcgctggcgggggtgaaaagcgcgcagcaggttcgcattcgtgccgcccggtcgctgggtgccagccgtgcgcaggtgctgtggtttgtcattttgcccggcgcgctgccggaaatcctcaccggattacgcattggtctgggtgtgggctggtctacgttggtggcggcggagctgattgccgcaacgcgcggtttaggatttatggttcagtcagcgggtgaatttctcgcgactgacgtggtgctggcggggatcgcggtgattgcgattatcgcctttcttttagaactgggtctgcgcgcattacagcgccgcctgacgccctggcatggagaagtacaatgagtgaacgtttgagcattaccccgctggggccgtatatcggcgcacaaatttcgggtgccgacctgacgcgcccgttaagcgataatcagtttgaacagctttaccatgcggtgctgcgccatcaggtggtatttctgcgcgatcaagctattacgccgcagcagcaacgcgcgctggcccagcattttggcgaactgcatattcaccctgtttaccctcatgccgaaggggttgacgagatcatcgtgctggatacccataacgataatccgccggataacgacaactggcataccgatgtgacatttattgaaacgccacccgcaggggcgattctggcagctaaagagttaccttcgaccggcggtgatacgctctggaccagcggtattgcggcctatgaggcgctctctgttcccttccgccagctgctgagcgggctgcgtgcggagcatgatttccgtaaatcgttcccggaatacaaataccgcaaaaccgaggaggaacatcaacgctggcgcgaggcggtcgcgaaaaatccgccgttgctacatccggtggtgcgaacgcatccggtgagcggtaaacaggcgctgtttgtgaatgaaggctttactacgcgaattgttgatgtgagcgagaaagagagcgaagccttgttaagttttttattcgctcatatcactaaaccggagtttcaggtgcgctggcgctggcaaccaaatgatattgcgatttgggataaccgcgtgacccagcactatgccaatgccgattacctgccacagcgacggattatgcatcgggcgacgattcttggggataaaccgttttatcgggcggggtgatacgagagtggacggtcacctcgagcggcgaaagaacggtgatatagatgaagcgagcacggacagtcccttcgcccccttggggagagggttagggtgagggggcgttcaccgtactttcaacaggttaactccccctttctgagaggaaacaaaattaacgcagaatcttcttctcagccaaatccatcgcaaagtagctgaaaatcagatccgcacccgcacgcttaattgaacctaagctttcgagcacgactttctcttcatctatagcacccgccagcgcggcgaacttaatcatcgcgtactcaccgctcacctgatacgcgccaatcggcaattcagtacgttcacgcagctcacgcacgatgtcgaggtacgctccggcaggtttaaccatcagacagtctgcgccctgggcttcatccagcagtgactcacgaatcgcctcacgacggttcattgggttcatctgatagcttttgcggtcgccttttaatgcgcttccggcagcttcacggaacggaccataaaaggaagaggcgaacttggtcgaatacgacataatcgccgtatctttaaagcccgcagcgtccagcgcctggcgaatcgcctgtacctggccgtccatcgcggcagaaggggcgatgaagtctgcgcctgcagcagctgcaaccacggcttgcttgcctaaattttccagagtcgcgtcgttgtcgacgccatgctcgcacagcacaccgcagtgaccgtgagatgtgtattcgcagaagcaggtgtctgacatgacgatcatttctggcacggtctgcttgcagatgcgcgacattcgcgccaccagtccatcttcccgccaggcatcgctgccggtttcatcggtatggtgagagatgccgaaagtcatcacggaacgaataccggcgttggcgatgcgttcaatttcgcgtgccagatgtttctctggaatgcgcatcacacctggcatggcttcaacggctttgtagtcgtcaatttcttcttcaacaaagatcggcaacaccaggtcgttaaggctaagtgttgtctcttcaaacatagcgcgcagcgcaggagatttgcgcaggcgacgagggcgttggattaagtctgtcatggtctgcctgatgtttgtggaattaaggtgcacagtatacctgaagcggggcaggagtgttttacgaaagttgtcgcgatgttgacaagaagagaatgaaagagagaccaggacatctttgtaatagaaatagcaataatttcatattcactgaaaatatttttaatctttattaatagctcttggttattatttggggagtttggttgtgctgctataaattgaataattaaaactttgttgcatattgataggatatttgtctggtttgtgtctgtgatatttatgatgcgtatgtttcaaaaataacattatctgcaacatattgaaatatggtgtttttatcaatttgatgtgtatttttctccataaattatatatgtccacattcggacttaggggaaagaataattgaaccattcgtctgtaacgcagcataatcgttagcgcgaaacataatatgttttctatgcattgataattgatggatcaacttattacgtccctgaggagggatgacaaatgcactcctggaaaaagaaacttgtagtatcacaattagcattggcttgcactctggctatcacctctcaggctaatgcagcgaccaacgatatttctggtcaaacttacaatacttttcatcactacaacgacgccacctatgctgatgacgtttactatgatggttatgtaggttggaacaactatgcagctgatagctattacaacggcgatatctacccggtcattaataacgctactgttaacggcgtgatttctacctactatctggacgacggtatttctaccaataccaacgccaatagtctgacaatcaaaaacagcactattcacggtatgatttattccgagtgcatgacaactgattgtgctgatcgtgcgaatgattattaccatgaccgtctggcgctgactgttgataattcaacgatcgacgacaactacgaacactacacatataacggcacttacaataatgccgctgatactcatgttgtaaacgtatataacattggtactgctattactctggatcaggaagttgatctgtccatcactaataactctcacgtagcgggtattacgctgactcagggttatgagtgggaagatattgacgacaacactgtcagcactggtgtaaacagcagcgaagtgtttaataacaccatcactgttaaagattctaccgtgacctctggttcatggactgatgaaggtactactggttggtttggtaatacaggtaatgccagcgattacaatggtgatgggtggaatgctgatgatgttgcattagctgttattgcacatccatatgctgataacgccatgcaaaccactgcaacattcgacaattccacattgatgggcgatgtattcttctcaagtaactttgatgagaacttcttcccacatggccgtgatagctatcgtgatgccgatggtgatgtagatactaacggttgggatggtactgatcgcctggatctgaccctgaacaatggcagcaagtgggttggtgcggcaatgtctgcgcatcaggttgatctgggttcagatattgggacagataccgatggcgacggtgatgttgataacgatacccttgatggtaagatcgataaaaacagcccgctggatggcatttacgatgcttatgcgatgggttccgacgccactgcaactctgatcgatatcgcagctaacagcctgtggccttcatcaactgttggtgtagaaaacagcgactctgaatacagcgaatttgatcacatcatcggtaacgaagtttaccagagcggtctgttcaatgtgaccctgaacaccggttcacagtgggataccaccaaaacttctctgattgatactctgagcatcaacagtggttcaactgttaatgttgctgattcaacgctgatttctgactctatctctctgacaggtctttctgcgctgaacatcaacgaagatggtcatgttgcaactgattcactgactgtcgacaacagtaccgtaaccatttctgatgaagtttctgctggttgggctgtaggtgatgctgctctgtatgccaacaacatcaaagtgactaacgacggtattctggatgtcggtaacactgcggcgaatgctctgcaggttgatactctgaacctgaccagcactactgataccagtggtaacattcacgctggtgtgttcaacatcgaaagcaaccgcttcgtacttgatgcagacctgaccaacgaccgtaccaacgatactaccaagtcaaactacggttatggcttaatcgcaatgaactctgatggtcacctgaccattaacggtaacggcgataacgacaacactgcttctatcgaagctggtcagaacgaagttgataacaacggtgaccgtgtagctgcggcaaccggtaactacaaagttcgtatcgacaacgcaactggcgcaggttctgttgctgactacaacggtaacgagctgatctacgtcaacgacaaaaacagcaacgcgaccttctctgctgctaacaaagctgacctgggtgcatacacctatcaggctgaacagcgcggtaacaccgttgttctgcaacagatggagctgaccgactacgctaacatggcgctgagcatcccgtctgcgaacaccaatatctggaacctggaacaagacaccgttggtactcgtctgaccaactctcgtcatggcctggctgataacggcggcgcatgggtaagctacttcggtggtaacttcaacggcgacaacggcaccatcaactatgatcaggatgttaacggcatcatggtcggtgttgataccaaagttgacggtaacaacgctaagtggatcgtcggtgcggctgcaggcttcgctaaaggtgacatgaatgaccgttctggtcaggtagatcaagacagccagactgcctacatctactcttctgctcacttcgcgaacaacgtctttgttgatggtagcttgagctactctcacttcaacaacgacctgtctgcaaccatgagtaacggtacttacgttgacggtagcaccaactccgacgcttggggcttcggcttgaaagccggttacgacttcaaactgggtgatgctggttatgtgactccttacggcagcatttctggtctgttccagtctggtgatgactaccagctgagcaacgacatgaaagttgacggtcagtcttacgacagcatgcgttatgaactgggtgtagatgcaggttataccttcacctacagcgaagaccaggctctgactccgtacttcaaactggcttacgtctacgacgactctaacaacgataacgatgtgaacggtgattccatcgataacggtactgaagggtctgcggtacgtgttggtctgggtactcagttcagcttcaccaagaacttcagcgcctataccgatgctaactacctcggtggtggtgacgtagatcaagattggtccgcgaacgtgggtgttaaatatacctggtaatattcttcactccgaagaaattctggtaatttaatctaaataatgcccgtcaaggatttgacgggcattactgcaaaggacgcgcaaatgttatctgtagttaaacctcttcaggaatttggtaagctcgataaatgtttgtccagatacggtacgcgcttcgagtttaataatgaaaagcaagttatattttccagtgatgtcaatagcgaagatactttcgttattttagagggagttatctctctgcgtagagaagaaaacgtacttatcggtattacccaggctccttatattatggggctggctgatggtttaatgaaaaacgatataccatacaaattaatatcagaaggaaattgtacgggatatcatctaccagccaaacaaaccattacgcttattgaacaaaatcaactctggcgagacgctttttactggttagcctggcaaaatagaattctggaattacgcgacgtgcagctcattgggcataattcctacgaacaaatccgcgcaacattattatcaatgattgactggaatgaagaattgcgatcacgtattggtgtgatgaattatatccatcaacgtacacgcatatcgcgttctgtcgtcgcagaagttctcgctgctttgcgtaaaggcggctatatcgaaatgaataaaggcaaactggtcgctatcaaccgtttgccttcagagtattaatcaggatgcggggataaccaacggtttattcccgcttagctcggtcaccagatcattgatgccatcgctcatatttttaaagcgcgtcaacggcgaacgagtgaccaccacaaacgcgccaatattcttctgcgggatcatcgccatataggtaatgaaaccgccaccaccgcctgtcttctgaataatccccggacgaccctctttcggggccatatatacccagcctaaaccaagcgcatccgctttgccggggacatccatgccaatcactttcgtaaactgcgcgcgcggataaatcaacgtctgcatgcgatctgcctggttactgcgctgataaaaatcagatgacaaatactgctgcatccagcgcatcatatcgccaggcgtggaatagacgccgccgctgccaattgccgccagcgtgttattgcacggactggcaccgcgctcagcaaccattaaacggcggcactgatccggtgagggggtgtaggtggtgtctttcatccccaatggacgggtaatctgctcttcaaacaactgggtataaggcttgccggacgcattcgccagtgcatctgccagcaggtcgaacgcaaggttagagtacgccgcctgactgcctggcgcggctttcagcttcgccgtagaaaggtatttccagcgttgctcgcgcgttggccagacaaacaccggacgatgtgccgcgccaccgggctgttcacggggcagggcgctggtatgggttgccagattcactagggtaatgggcgtcccattgtaggtcggcacgcgtgcgcctggcggagcatatttacttagcggatcgtttaactttacggtcccctggtcgagcaatttcaccagcatttcactggtcattagtttggtgagggaagcaatacgcacgaccgaatccagctgcgggcgaacgttattaccaggtcgcgtttcgccataactacgaaagacgcgctggttaccgtcgataacaaccagcgccatccccgtggcaccgctgccgtaaaaaatatgatcggcataacgatcgacaatatcagaggcaaactccggttcagtgatcggctgcgccgcatggacggaggtcaatgacgccgcacacagcacggcagaaaaaagcagactacgtttcaacggtggtgtccataaattgaatgaaggtaactgagcgtatttatactactcattgatggattgcaaagggcgaattagtgcaataatagtgttaaaaacgtaacggcgcgtaaacacgatctttttcctgctcaccaatgcctgcatttgtgatcctgcgcgtgttaatccgcttatgtaaacaatctttggtttgtgaaatccgtcgaaacaattcttatggtcaggctggcgaactaagcgccttgctatgggtcacaatgggcggtttcatttggctgacgctttgtagtggtcatgcggttaatacacagcagttgttaaaacgataagaagttagcaggagtgcatatgtttaagtcttttttcccaaagccgggagcgttttttctctcggcctttgtttgggcattgattgccgttatcttctggcaagccggtgggggagactgggtggcgcgtatcactggcgcttccgggcagatcccgattagcgccgcgcgtttctggtcgttggatttcctgattttttacgcttactacattgtttgcgtaggactttttgcatttttctggtttatctacagcccgcaccgttggcaatactggtcaatactcggtactgcactgatcatcttcgtcacctggtttttggtggaagtcggggtcgccgtcaacgcctggtatgcaccgttctatgatctgattcaaaccgcgctaagttcgccgcataaagtcactatcgaacaattttaccgcgaagtgggcgtctttctggggattgcgctgatcgctgtggtgatcagtgtgctgaacaacttctttgtcagtcactacgtgttccgctggcgtacggcgatgaacgaatattacatggcgaactggcaacaactgcgtcatatcgaaggggccgcacagcgtgtgcaggaagacaccatgcgttttgcttcaacgctggagaatatgggcgtcagttttatcaacgccatcatgacgttgatcgccttcctgccggtgctggtaacgctctccacgcatgtgccggagctgccgattatcgggcacattccgtatggtctggtgattgccgctatcgtctggtcgctgatggggaccggattgctggcagtggtagggatcaaactgccggggctggagtttaaaaaccagcgagtagaggccgcctaccgtaaagagctggtttatggtgaagacgatgccacgcgtgcgacgccgcctacggtacgcgagctgtttagcgccgtgcggaaaaactatttccgcctctattttcactatatgtatttcaacatcgcccgcattctctatttgcaggtcgataacgttttcggtttgttcttgctgtttccgtcaattgttgccggtacgattacgctcggcctgatgacgcagattaccaacgtttttggtcaggttcgcggtgctttccagtacctgattaactcatggaccacactggttgagttgatgtctatctacaaacgtctgcgcagctttgaacatgaactggatggtgacaaaattcaggaagtaacccataccttgagctaaaaaggagaagtaatgtcgcgcgtcaatcctctatcttcgctgtcattgttggcggttctggttttagcggggtgtagtagtcaggctccgcaaccgttgaaaaagggagaaaaagcgatagatgtggcgagcgtcgtgcggcagaagatgcctgcgagcgtgaaagaccgcgatgcctgggcgaaagatctcgccaccacctttgaaagtcaggggctggcaccgacgctggaaaacgtctgctcggtgctggcggtggcgcagcaggagtcaaattatcaggcagatccggccgttccgggcttaagcaagatcgcctggcaagagattgaccgtcgtgctgaacggatgcacattcctgcttttctggttcataccgcgctaaaaatcaaatcgccaaacggcaaaagttatagcgaacggttagattcggtgcgtacagaaaagcaattgagcgcgatttttgacgatctgatcagcatggtaccaatggggcagacgctgtttggttcgcttaatccggtgcgcaccggtgggccgatgcaggtcagcattgcttttgccgaacagcataccaaagggtatccgtggaaaatggacggtacagttcgtcaggaagtcttcagtcgccgcggcgggttgtggtttggtacttaccatttactgaattatcccgccagctatagcgcaccgatataccgctttgctgattttaacgctggctggtacgccagccgtaatgccgcgtttcagaacgcagtcagtaaggccagcggcgtgaagctggcactggacggtgatttaattcgttacgacagtaaagaacccgggaaaaccgaactggcaacgcgcaaactggcgggaaaactggggatgagcgacagcgaaattcgccgtcagttagagaaaggtgacagcttctcttttgaggagacggcgctgtacaagaaagtttatcaacttgccgaagcgaaaacgggtaaatcactaccccgcgaaatgttgcctggcattcaactggaaagcccgaaaatcacccgcaacctgactacggcctggtttgcgaagcgcgtagacgaacggcgggcgcgttgtatgaaacagtgatcaaacaggaatgtcatgccagataaggcgttttaggccgtatctggcaacgtaaatcttactggcggcgatgtcgccagtgcagccatagcgccaccactgcaaaaatgaggcagcctactaaaaacgggatcagcccgaaaatggtgccgacacctaaaccaatttccacccgtgggcgacctgtttcctggacctgcattaaacgctcatagacgccgggcgcatgcactaacaggttcagcaattgcgccccagcccaaaagcaaaacagcacaaacaacgcataggcaatgttgccaggcgttgaagaggcattgcgatattttccgctaaacagcgattttgacagggtgaaatcagccataaaaacctccggaagtcatctgcttctcttctggtgtgataccagcggcttatggcaagtctgacaggtcatttagattgtcaatatcagaatcatggtaaattgatgttgggaatattcccgaagcgtgaatcttcgttgtgagtcacaaaatggcaaccttaagttaaatttattaacaattacgaaaatgttgtctacaccacagacggttgttacagaatatgcaaggatgttgtttttcgttaacggagctgccatgaatctgcctgtaaaaatccgccgtgactggcactactatgcgttcgccattggccttatattcattcttaatggcgtggtggggttactgggatttgaagcaaaaggttggcagacctatgccgtcggtctggtgacgtgggtgattagtttctggctggcggggttgattattcgtcgtcgcgatgaagaaactgaaaacgcccaataagaatattatcgggcgttaaaatattacattgtggttttcaatgcgttatccgcagcgtgacgctccagcgccagctcaatcaaacgtgtgatcagatcggtgtaacccagaccgctggcttgccacagcttcggatacatactgatgttggtgaagccaggcagtgtgttgatctcgttgatcaccacttcgttctctggggttaaaaacacgtctacacgcgccatgcctgcgcatcccaacgtctgataagcctgaacggcaatcgcccggatcttatcgttgatctctggtgcaatggctgccggaactaccactttcgcgccatcttcgtcaatgtacttggtgtcgtaggcatagaagtcgctggtgagtacgatctcgccacaggtgctggcttgcgggttgtcgttgcccagaactgcgcattcgatctcacgacctttgatcccttgctcaacgatcactttatgatcgaattcgaacgccagatcgacggcaattgcgtactgttcttcactggttactttgctgacaccaacagaagagccctgattagccggttttacaaacagtggtaaccccagtttagactccacttcggcaaaactgatgttgtgacgattagcgcgcgtcagggtaataaatggcgcaatgttcagcccggcatcgcgtagcagacgtttggtgacatctttatccatacaggctgctgaagccagaacatcagaacctacaaacggtaaattggcgacccgcagcattccctgcaaggaaccatcttcgcccagcgtaccgtggacaatcgggaaaatgacatccaccgtcggcaacggctgaccgttttgcgcgtcgataagctgatgctcatgtttacctggcacctgcgcaaggctggtcgccgaagggcgcaacgcaatatgggcaggatcgtctgcatttagcagataattgctggcatcgctgacgtgccattgcccttgtttatcaatgcccagcagcacaacgtcgaagcgacttttatcaatggcatcgacaatgttttttgccgattgcagagacacttcatgttccgctgatttaccaccaaaaacgattcctacccgcagtttttccatcttaaaaacctatcccgtctaacacaaagtgcatacattaccacgacaaaacgggggattcgcggccttctgaaagattgttgcaatcttctgctgacaaagcgtgcaacgtactggtgaagaaagtgcgttatctcaaagatgtgcgcaagatcacaaaaatgatgaacgggaagctaatttattcctggcttaaatggccatgcggtgagtttttttctcttaattataagttaatgaagagaatatatttcataacttttatttataataaaggttgataattaaaagcctatattttgtgtgggtagttatttaaataagagaaacgtttcgctgataatcaaacaaaaaatatttgcgcaaagtatttcctttgtcataaaaataatacttccagacactatgaagttgtgaaacataatgttaacttctccatactttggataaggaaatacagacatgaaaaatctcattgctgagttgttatttaagcttgcccaaaaagaagaagagtcgaaagaactgtgtgcgcaggtagaagctttggagattatcgtcactgcaatgcttcgcaatatggcgcaaaatgaccaacagcggttgattgatcaggtagagggggcgctgtacgaggtaaagcccgatgccagcattcctgacgacgatacggagctgctgcgcgattacgtaaagaagttattgaagcatcctcgtcagtaaaaagttaatcttttcaacagctgtcataaagttgtcacggccgagacttatagtcgctttgtttttattttttaatgtatttgtacatggagaaaataaagtgaaacaaagcactattgcactggcactcttaccgttactgtttacccctgtgacaaaagcccggacaccagaaatgcctgttctggaaaaccgggctgctcagggcgatattactgcacccggcggtgctcgccgcttaacgggtgatcagaccgccgctctgcgtgattctcttagcgataaagctgcaaaaaatattattttgctgattggcgatgggatgggggattcggaaattactgccgcacgtaattatgccgaaggtgcgggcggcttttttaaaggtatcgatgccttaccgcttaccgggcaatacactcactatgcgctgaataaaaaaaccggcaaaccggactacgtcaccgactcggctgcatcagcaaccgcctggtcaaccggtgtcaaaacctataacggcgcgctgggcgtcgatattcacgaaaaagatcacccaacgattctggaaatggcaaaagccgcaggtctggcgaccggtaacgtttctaccgcagagttgcaggatgccacgcccgctgcgctggtggcacatgtgacctcgcgcaaatgctacggtccgagcgcgaccagtgaaaaatgtccgggtaacgcgctagaaaaaggcgggagaggatcgattaccgaacagctgcttaacgctcgtgccgatgttacgcttggcggcggcgcaaaaacctttgctgaaacggcaaccgccggtgaatggcagggaaaaacgctgcgtgaacaggcacaggcgcgtggttatcagttggtgagcgatgctgcctcactgaatgcggtgacggaagcgaaccagcaaaaacccctgctaggactgtttgctgacggcaatatgccagtgcgctggcaaggaccgaaagcaacgtaccacggcaatatcgacaagcccgcagttacctgtacgcctaatccgcaacgtaatgacagcgtaccgaccctggcgcagatgactgataaagccattgaattgttgagtaaaaatgagaaaggctttttcctgcaagttgaaggtgcatcaatcgataaacaggatcacgctgcgaatccttgtgggcaaattggcgagacggtcgatctcgacgaagccgtacaacgggcgctggaattcgctaaaaaggatggcaacacgctggtcatagtcaccgctgatcacgcccacgccagccagattgttgcgccggacaccaaagcgccgggcctcacccaggcgctaaataccaaagatggcgcagtgatggtgatgagttacgggaactccgaagaggattcacaagaacataccggtagtcagctgcgtattgcggcgtatggcccacatgccgccaatgtcgttggactgaccgaccagaccgatctcttctacaccatgaaagccgccctggggctgaaataaaaccgcgcccggcggtgaattttcgctgtcgggtggtttttttgctgttagcagccagacttaatggcagatcacgggcgcaaacgctcatggttaaaacatgaagagggatggtgctatgaaaataacattactggttaccttgcttttcggactggtttttttaaccaccgtcggcgctgccgagagaaccttaaccccgcaacaacagcgtatgacctcctgtaatcagcaggcgacggcgcaggcgttgaaaggggatgctcgtaagacctacatgagtgattgcctgaagaacagcaagtctgcgcctggtgaaaaaagtttgacgccacagcagcaaaagatgcgcgaatgtaataatcaagcaacgcaacaatctctgaaaggtgatgatcgtaataagtttatgagtgcctgcctcaagaaagccgcctgatacctgatagtgctaacgggtgagctacgaaagtggctcacccgaaatttcatacttctgcctttagccccgtctctataatttgggaaaattgtttctgaatgttcccaaaaataatgaatgatgaaaactttttcaaaaaagcggcggcgcatggggaggaacctcctttaactcctcaaaacgaacatcagcggtccgggctgcgcttcgcccgtcgcgtcagactaccccgtgcggttggcctggctggcatgttcttaccgattgcttcaacgctggtttcgcacccgccgccgggctggtggtggctggtgttggtcggctgggcgttcgtctggccgcatttagcctggcagatagcgagcagggccgtcgatccgcttagccgggaaatttacaacttaaaaaccgatgcagtattagcgggaatgtgggtaggcgtaatgggcgtaaacgtgctgccttccaccgcgatgttgatgattatgtgtctgaatttgatgggggcaggcggcccccgtctgtttgtcgcgggtctggtgttgatggtggtttcctgccttgtcaccctcgagctgacgggcattaccgtgtcgttcaatagtgcgccgctggaatggtggctctcccttcccattattgtcatttatcctctgctgtttggctgggtcagctaccagacggcaaccaaactggcggaacataaacgcaggttgcaggtcatgagtacccgcgacggcatgacgggcgtgtataaccgacgtcattgggaaactatgttacgcaatgaatttgataactgtcggcggcataatcgcgatgcaacgttactgattatcgatatcgaccatttcaagagcatcaacgatacctggggccatgatgtgggcgatgaagcgatagtggcgcttacccgacagttacaaattaccctgcgcggtagcgatgtgattggtcggtttggcggcgatgagtttgcagtaatcatgtccggtacgccagctgagagcgctattaccgccatgttacgagtgcatgaagggctaaatacattacgtttgccgaatacgccacaggtaactttacggattagtgtgggggttgcgccgctgaacccacaaatgagtcactatcgtgagtggttgaaatcggcagatttggcgctttacaaagcaaagaaagccggacgtaactgcaccgaagtggcggcctgacgtccggcgaaagtcatcaggatttgctgagtttttctgatttttccatacacttcgtcatcgcttcgatcactgcggcacggaagcctttctcttccagtacgcgtaccgcttcaatggtggtgcctcccggtgagcagaccatatctttcagtgcccccggatgttctcccgtttccagcaccatttttgcggaacccattactgcctgagcggcaaatttatacgcctgggcgcgtggcatcccgcccagcacggcggcgtcggccatcgcttcgataaacataaatacgtaggctggcgaagaaccgctcacaccgaccaccgggtggatcatcggctcagcaatcacttccgcttcgccaaagcagcggaaaatattcagcacatcagcggtatcttctggggttaccagcgcgtttggcgttacggaggtcatcccggcattaaccagcgcgggagtgttcggcatggcgcggataattttccggtcatggcccagcgcgcgggcaagttggtcgagcgtgacacctgcagcaatagaaacgaccagagagtctttattcaggctggaggtgatttcgctaagcactttaatcatgatgccaggtttaacggcagcaaaaatgatgtcggcgatttgcgccacttcttgcgccgattctgcggcgttgatgccgaactggtcatgcagggcggcgactttatccggggagggggtatatacccagatttgccctggaagcacctgaccgctggcaatcagaccgccgagaatggcttttcccatattgccgcagccaataaaaccgattttcttttccattgcctcactcctgccgtgaaatttattgttttgataatcgctggcagaagcataaacagaactatgccggaaggcaaaagcgcgacacaatagaggattacccaacaaaggatgactttatgacaatttgggtggatgccgacgcgtgtcccaatgtaattaaagagattttgtatcgcgcggcggaacgtatgcagatgccgctggtactggtagcaaaccagagtttacgcgtgccgccatcgcgatttattcgtacgctgcgcgtcgcggcaggtttcgacgttgccgataacgaaattgtccggcagtgtgaagcgggcgatttggtgatcaccgcagatatacctttggctgctgaagccatcgagaaaggcgctgcggcgattaatccgcgcggcgaacgttacacgccagcgaccattcgtgagcgcctgacgatgcgcgattttatggataccttacgtgccagtgggatccagaccggcggaccagatagtctttcacaacgtgaccgccaggcctttgctgcggagctggagaaatggtggctggaagtgcaacgtagtcgcggccaaatgtaatttattatttacacttcattcttgaatatttattggtatagtaaggggtgtattgagattttcactttaagtggaatttttcctttacaatcgaaattgtactagtttgatggtatgatcgctattctcatgacaccggctttcgccgcattgcgacctattggggaaaacccacgatgacacaacctctttttctgatcgggcctcggggctgtggtaaaacaacggtcggaatggcccttgccgattcgcttaaccgtcggtttgtcgataccgatcagtggttgcaatcacagctcaatatgacggtcgcggagatcgtcgaaagggaagagtgggcgggatttcgcgccagagaaacggcggcgctggaagcggtaactgcgccatccaccgttatcgctacaggcggcggcattattctgacggaatttaatcgtcacttcatgcaaaataacgggatcgtggtttatttgtgtgcgccagtatcagtcctggttaaccgactgcaagctgcaccggaagaagatttacggccaaccttaacgggaaaaccgctgagcgaagaagttcaggaagtgctggaagaacgcgatgcgctatatcgcgaagttgcgcatattatcatcgacgcaacaaacgaacccagccaggtgatttctgaaattcgtagcgccctggcacagacgatcaattgttgattttcgagcgcctatacttaacgttcatcccgtgaaataaggaagaacgatgccaacgaaaccgccttatcctcgtgaagcatatatagtgacgattgaaaaaggaaagccaggacagacggtaacctggtaccaactcagagccgatcatcctaaaccagactcgttgatcagtgaacatccgacggctcaggaagcgatggatgcgaaaaaacgctatgaggaccctgacaaagagtgaccgcatcagactgctcggaagggattctgagtgccactacaagggatctgcgtcacatttttcataattcatgtttttctaataattagaatattaaacaataacaatccattactggaatcatttggaatctttacattatgccgtgcacgtctgctgctacgctttttgtcatttgtagcacaagtaagtgtcagcagtggtgcttcacacttgcccggtaattaacgacgaaagaaaagtaaggtggatgaacaatgagtgcgtcgttggcgatcctgaccatcggcattgtacctatgcaggaagttttgccgctcctgacggaatacattgacgaagataatatttcccatcatagcctgctggggaagttaagtcgtgaagaagtgatggcggagtacgcgccagaagcaggcgaagacaccattctcacattattaaatgacaaccatctggcccatgtttcgcgtcgcaaagtggagcgagacctgcaaggtgtggttgaagtgctcgataatcagggttatgacgtcattttattaatgagtacagcaaacattagtagtatgactgcgcgtaatacgatctttcttgagccgtcgcgaatattgcctccactggtttcctctattgttgaagatcatcaggtgggggttatcgttccggttgaggagatgctgaccgttcaggcgcaaaaatggcaaattttgcagaaatcgccggtattttcattgggtaaccccattcatgattcagaacaaaaaatcattgatgccgggaaagaattactggcaaaaggggctgatgtcatcatgctggattgtttaggatttcaccaacgtcatcgcgatttactgcaaaaacagctcgatgttcctgtcttgctgtctaacgtattgattgcacggctggctgcggaattactggtgtaattttgcgtgacagccagcgcctctggcccctatagtgaagtagatgttcaactaccagacagggccagtttatgcttcaaagtaatgagtacttttccggcaaagtgaaatcaatcggcttttccagcagcagcactggtcgcgccagcgtgggtgttatggttgaaggcgaatacaccttcagcaccgctgagccggaagagatgacggtaatcagtggcgcgctgaatgtgttactgcctgacgcgaccgactggcaggtgtatgaagccggttcggtgtttaatgttcccggtcacagtgagtttcatctgcaagttgccgaacccacctcttatctgtgccgctatctgtaattcctcgccttccccttgaacgggagggcatttttctgaaatatcctctctttaacccataataatatttcctttgctgcgattttttcaatttccgatatattcataattcatcaaggttgatataaatatcagtgaagatctccagatattgttgcggaactggctacgataaaagataaatcagatgatgaatggtggcgtgcattgctgcaaagtcgcaatgatcatttgcgccaaacggcattacgcaacgcacataccccggcgtcgttgttaacgacattgaccgagtctcggcatcggtcgctagctatgaataatccacagctcgctgccgatgtgaaaacgacgtggttaaaagaggatccatcattactcttatttgtcgaacaacccgatctttcgctgttacgggatttagtgaaaaccggggcaatgcggaaaattcgcagtgaagcgcgtcactggcttgaggaaaaacaatgacacaacgtccatggagcaagttacagcgtaaaacgcataatactgctgcgctaaaaattattgcccgccgtagcgaataattatatgcctggtgtggcttcgtacgccggataagacgcagcaggcgtcgcatccggcattaaaggaaaatcagcaattaacgttgtgcttcgccacctaatccttcaatcaggttttgaattaacgctgccagttcaccagtcatcaggatgaaatcggcatcaaaacgctgggcgaaatcttcacggtcgatatcttcgttttgatcgcgcagctcgtcgcagaacttcagacgcttgagcgaaccatcgtcgcacatcacaaactgaatgcgctgctgccagtcgagcgccagtttagtcaccacttttccggcttcaatgtgattggtgatctcttcgctggtcagatcttgtttcttcgcgcggatcactccgccatcttccagcaacgatttcagctcggcttcatcaagcaactggaagccctgtgccgcactaccggaacgtacccattcggtcagcgtcagttcaatcgggttttccatgctcaatggtacaaccggtaacgaccccaggcttttacgcagcagtgccagcgtatcttccgcttttttggcactggcgcagtccaccataatcaaaccgttaaccgtgtcgatccacatcattgtctggctaaaacggctgaaagcacgcggcaacagagagtgcagcacttcgtctttcagcgaatctttttcggttttcttcagcttacgcgcctgttccgcttccagtttggcgattttcgcttccagcgcctgtttaatcaccggagacgggaggattttttcttctttgcgcgcgcagataacaatttgaccattggcaacgtgcgttaacgcatcgctgtgcgatcccatcggaggaacccagcccatcttcgccatgtcctggctgccgcatggggtaaatgccatcgaggctagctgtttttccatctcttctgcacgcagcgaaatctcgcggctaagacggtaaaccattaaatttttgaaccacagcatgataatttccacggccttgtcgttaaatttagcgggcatgataacgaattgtcggcggccttgcattgccaatccggttgtccgtctctacgctattgatattgaaaaaaataaggagagtaccgtgcgtataggtatcgatttaggcggcaccaaaactgaagtgattgcactgggcgatgcaggggagcagttgtaccgccatcgtctgcccacgccgcgtgatgattaccggcaaactattgaaacgatcgccacgttggttgatatggcggagcaggcgacagggcagcgcggaacggtaggtatgggcattccaggttcgatttcgccctacaccggtgtggtgaagaatgccaattcaacctggctcaacggtcagccattcgataaagacttaagcgcgcggttgcagcgggaagtgcggctggcaaatgacgccaactgtctggcggtttcagaagcggtagatggcgcggcagcgggagcgcagacggtatttgccgtgattatcggcacgggatgcggcgcgggcgtggcattcaatgggcgggcgcatatcggcggcaatggcacggcaggtgagtggggacacaatccgctaccgtggatggacgaagacgaactgcgttatcgcgaggaagtcccttgttattgcggtaaacaaggttgtattgaaacctttatttcgggcactggattcgcgacggattatcgtcgtttgagcggacatgcgctgaaaggcagtgaaattatcagcctggttgaagaaagcgatccggtagcggaactggcattgcgtcgctacgagctgcggctggcaaaatcgctggcacatgtcgtgaatattctcgatccggatgtgattgtcctggggggcgggatgagcaatgtagaccgtttatatcaaacggttccgcagttgattaaacaatttgtcttcggcggcgaatgtgaaacgccggtgcgtaaggcgaagcacggtgattccagcggcgtacgcggcgctgcgtggttatggccacaagagtaaaaaacgtaggcaattggcgcatcatgcctgatgcgacgcttgccgcgtcttatcaggcctacaaaatgtgccagaaccgcgtagggcggataaggcgttcacgccgcatccggcaataagcaacgcgcaccgtgacagtaatctaccccagtggtttcgccagcaccggactatccgccgcttgctggcgcttatagcgaccatacagcagcaacgacgacatcgcagcaaacgaaagcagggcggcaggcagcgccacgtaattatatgccagccccagcatcagcatcatacctccgcaatatgcgccgacggcgctaccgaggttaaacgctatttgcccacctgcggcacctaataactctccgcctttggcgttttgtagtaacaatatttgcagaggtgctgaaagggcaaataatcccgcgcaacaaataaaagcaaaaataagcgacgttgttttcatgccgccgcagaaaaaaagcatcagcagtgccagtacaatgataaagtcagttactgctgcaatgcgcagtggtgaataacgtcctgaaatcctgccacttagcacattccccagcaccatccctagcccaactaacatcataataaaggtcatcgccgtttccgaaaaaccggaaataaacatcatgtatggctttacgtagctgaaccaggcaaacacacctgcgttgccaaacatggtggcggcgaaaattaaccacggggccgggctgcgcaaaaagtgaaattgttcgcgcagctttcctttcgcctcgtcgcgaatatctggcacccaaaaatagaccgatgccatcaccgcaatattaaaaacagcgatcaataaaaaggtgtaacgccagctaaattcctgacttaaatacgttcccagcggaatgcccagcaaattggcgactgtcatcccggaaaccatccccgccacggcggcggtgacttttccgggtttgataatttttgataacacgatcgctccgacgccaaaaaatgcgccatgcggaaagccggataccagccgaccaatggcgagcatcaggtaagacgaagagagcgtgaacatggcgttgccaatgacgcacaacgccaccagaaacaacaagatatgtttgagtgagtagcggctggaaaagagtgcgatgattggcgcaccgaccaccacccccagtgcataatacgagatcatatgcccggcagcaggaatcgaaattcctacgttatgcgccagctccgtgagcacgcccataatgccaaattcggccatccccaaaccaaacgtgcccagagccaaagataaaatgacttttttcataccaccatcacaaccaccagaacggctaccaatcaccgtagctaataaagtgatagcttgcaggataacgaccagcaaggccaagagataattcgcccctctgtattcattatcctgctaaatagttatttcactgcaaacgtactttccagtttgctgtagcccaggccgttgatctttttcactttgatctgcaccggaatacgctctttcatcgcttctacgtggctaatcacaccgatggttttgccactggcgttcagggcatccagcgcatcaagggcggtatccagcgtttcgctatccagcgtgccaaaaccttcatcaaggaacagcgagtcaatacgtgttttatggctgaccagatccgaaagcgccagcgccagcgccagactaacgaggaaactttcgccgccggaaagggtacgggtatcgcgtaccgcatctgcctgccaggtatcaacaacctcgacttccagcgcctcgctggctttgcgctgtaacagatagcgcccgtgcagccgggtaagttgctgattagcgagatggactaaattatccagcgtcagcccctgggcaaacttgcggaatttatcgccctctttggaacctattagcgaattcagatatccccagtcctcaacctgctgcgtcatttgagcaatttgctgcattaaggtttgttgttgctgacggttatctgcatcctgcttcagctgctggcgaatctcgccttgactcgtggtgttttcacgcaacttttggtgagtttgcgctaactcttgctgaatctgctccaccgtcacagtgagagccaacccgtcgtcaggtcggtgttgttgatgctgtgccagcgtttctgctgtctgagtgaccagagtttgcgcctgacggcgctggttttccagattctgcttgagctgttccagctgcgttagtgtttgttcatccattagcgccgcaaggaacgcctgctgatcgtcaaagacgctggcctgtagcgcggtgtcaaactgcgcctgggctttttgcagactttgcgccgccagaacatcctgttgctgtaacgtctgctgctggctgtgtaatgcgagacattgttcatgtacctgccgccagttttccaataccacagtttcttcgcagtgcgggagttcatcactttgcggcaacgtttccagaatcggcgtcagctgctgaatacggttttgcagcgcggttaattcgttctggcgttgctgccagctctgcgcttcttgctgacgtgtcgccaaccagctctcttcttcatcttcctgtggcaatgtcagtgcataacccgtcaatgtcgttaaaagtagttgctggcgttgttcaatttgctgttgatactggataatttgctgattatgcgcggcaatctgcccttgtaattcatgccgttggctgagtaaccgcagctggcgttcgtgctcatcttgtgcatccagccacggttgaatatcgtccagtggctgcaaggtgatattgaggctggccgtgacggcttgccattgttgagtaagtgcttgctcatcttgtcggaggctttgcgcttcgttttcatcacgctgaagctgctttgttatggcgtccagttgcccacgtagcgtcgcaccttcttcaccgagctttttaacttcgttttccagcgccagtaatcgagactgattaacgccaggctccagcgcctgatacgcctcgaccgccgggtggctggtggaaccacaaagtgggcaaggctgacccgcctgtaactgtgcacgttgagcttccagcgttttgatgcgcgcttcctgctcgcaaatggttttcacatcggcaagttgctgcgtcttttctttataacgctggcgcatttcgttaagtgcggcgttacgttgcgtctgttcttgcgtgacattctggatagcgacctgtaactgcgccagacgtttttgttggggaacaatctgtccatgcagcgcgaccaggtgctgacgcagtgggcgttgctcagcatgttgcgccagggcggtagcaacttcatcggcggttaacgtcaacgtgatcgccgcaagcgcattaagtttttgctcagcatgggttaactgttgctgccattgccgcagatgctcgcgatcgctggtttgttgggagaactgcgcacgccaacccgccggttcgttgttccactgacggaagcggtcgtgttcctgtaaccaggtattcaggctttgttgctgctgctgtaattctgctgactgcttcgccgcgtggtggcgaatgctcgcgcgaagcgccattgtgctctgtaagcgagtatttacttcttcaatctgctggcgaatatgcgccagcgccgcgctgtgttctgcgatgcgttcccagtgtggacgaagatttcgtgccggttgtgccagactaagcgccgccagttgaggttgcgctttttcttcttcggctaacgcctgttgcaaggcctgctgacggcggctggcttcttgctgcaattcgtcctgacgcgttaaccagtttagcgattgttgttcttgctgctgcgcggtaattaactgtttttcttcgtcagtaagtacctgcaaactcgctgtcagcgattgcacttgttccggcgtgagcaacgtgacgccgctggcctgcgcttgcagcttctccagctctgtgcgggccgatttgtgctgctcaaaaaccatcgccgagatttgcccgtagatttcagtgccggttaactcctcgagcaattccgcgcgttctttgggtttggcattcaggaaggcagcaaattgcccctgcgaaagcagcatcgaacgggtgaagcgcccgtaatccagcccggttaacgtcgctgtcagttccagcttatctttcactttgtcggcgagaattttgccgtcggcgcagcgcgccagctctacgcgtggcacctgcaaattaccgtcgggttggttacgcgcccgattctggctccagaatgcacggtacgcttcacctttcacttcaaactccacctccgccaggcattcggcggtatcgcgggtcatgagatcattttgcgattgtgaaacgttagagagacgcggagtttcgtgatacagcgccagacaaatggcgtccagcagggtggttttccccgcacctgttgggccggtaatagcaaacagcccgttgctggcgaacggctcgcgggtgaaatcaatcttccattcgccttttaatgagttcaggtttttcaggcgcaggctgagaattttcatgcttcgtgttctccggcgagggtatgcaacgtcgtggtgaaaagatgctgcagacgttgctgctgcgattcatccagttcttccagtgccagacggcgattgaacacctcttcgacgctgagttcgctgagggtttcacgctgttggctggctaacacacgctcgcgctgttcacgactccgacgtaccagcaatacttcgacaggcaatgattcggttaatgcctggattttgcgctgaatatcatgcagatactcatcagtagtgatttcgatatccagccagacaggtggctcctgcgatacatcgcgccactgttccagctgtgcggtaatcgacgccagatcgcctttcagcactgccatgggttgcgttaccggtacgttcaggttttccacgctctctaatttgccgtttgaaaatgtcaccagatggacatatttactcttaccgcattcatcaaaactcagtggaatgggggagccgcaatagcgaacatgttccatgccgccaataatctgtgcgcggtgaatatgcccgagcgcgatgtagtcggctggtggaaagttttgtgccggaaacgcgtccagcgtgccaatataaatgtcacgcacggcgtcacttttactggcccccacggtcgttaaatgtcccgtggcgatgatgggcagaggctgatcgccgcgcagtttgcaggcatcggcatagtgttgttggtaataatcggtaatcgctgccagtaaatgctgctgtttttcaataccgttaagccccgcctggctggtaataatgtcacgcggacgtaaaaacggaatggggcacagcactgcgcctggcgtcccgtcgcgacgaggcaagatttgcggcgcatgtccggcgctggcgaccacggtcgtattgaggaacgccatgatatcgcgcgattcattcagcgtggcgaccgagtcatggtttcctgccagtaccaccagatgacagccagtttgctgtaaattgacaacaaaacggttgtataacgtgcgggcgtaactgggcggcgagccggtatcgaaaacatcaccagcaacaataatcgcatccacctgatgggtttgtgctgtttccagcagccagtcaagaaaagcctgatgttcagcttcgcggcttttactgtagaagttctggccgagatgccagtctgaggtgtgaaggatgcgcataacggttccctggcgaaaaagcatgggcgcgattatacccaaacagatgtgccatttgcttttttctgcgccacggaaatcaataacctgaagatatgtgcgacgagcttttcataaatctgtcataaatctgacgcataatgacgtcgcattaatgatcgcaacctatttattacaacagggcaaatcatggcgagacgtattctggtcgtagaagatgaagctccaattcgcgaaatggtctgcttcgtgctcgaacaaaatggctttcagccggtcgaagcggaagattatgacagtgctgtgaatcaactgaatgaaccctggccggatttaattctccttgactggatgttacctggcggctccggtatccagttcatcaaacacctcaagcgcgagtcgatgacccgggatattccagtggtgatgttgaccgccagaggggaagaagaagatcgcgtgcgcggccttgaaaccggcgcggatgactatatcaccaagccgttttcgccgaaggagctggtggcgcgaatcaaagcggtaatgcgccgtatttcgccaatggcggtggaagaggtgattgagatgcaggggctaagcctcgacccgacatctcaccgggtgatggcgggcgaagagccactggagatggggccgacagaatttaaactgctgcacttttttatgacgcatcctgagcgcgtgtacagccgcgagcagctgttaaaccacgtctggggaactaacgtgtatgtggaagaccgcacggtcgatgtccacattcgtcgcctgcgtaaagcactggagcccggcgggcatgaccgcatggtgcagaccgtgcgcggtacaggatatcgtttttcaacccgcttttaacgccttgctcatcggacgcagagcagggcttatgatttcttaactggagtatcttacgtgctggaacggctgtcgtggaaaaggctggtgctggagctgctactttgctgcctcccggctttcatcctgggtgcattttttggttacctgccctggtttttgctggcatcggtaacgggactgcttatctggcatttctggaatttattgcgcctttcatggtggctgtgggtggatcgtagtatgaccccgccaccggggcgtggtagctgggagccgctactatacggcttacaccagatgcagctgcgaaataaaaaacgccgccgtgaactgggcaatctgattaaacgctttcgtagcggcgcggagtcgctgcccgacgcagtggtgctgaccacggaagagggcggtattttctggtgtaacggtctggcgcaacagattcttggtttgcgctggccggaagataacgggcagaacatccttaacctgctgcgttacccggagtttacgcaatatttgaaaacgcgtgatttttctcgcccgctcaatctggtgctcaacaccgggcggcatctggaaattcgcgtcatgccttatacccacaaacagttactgatggtggcgcgtgatgtcacgcaaatgcatcaactggaaggggcgcggcgtaacttttttgccaacgtgagccatgagttacgtacgccattgaccgtgttacagggttacctggagatgatggatgagcaaccgctggaaggcgcggtacgtgaaaaagcgttgcacaccatgcgcgagcagacccagcggatggaagggctggtgaagcaattactgacgctgtcgaaaatagaagccgcaccgacgcatttgctcaatgaaaaggttgatgtgccgatgatgctgcgcgttgttgagcgcgaggctcagactctgagtcagaaaaaacagacatttacctttgagatagataacggcctcaaggtgtctggcaacgaagatcagctacgcagtgcgatttcgaacctggtctataacgccgtgaatcatacgccggaaggtacgcatatcaccgtacgctggcagcgagtgccgcacggtgccgaatttagcattgaagataacggaccgggcattgcaccggagcatattccgcgcctgaccgagcgtttttatcgcgttgataaagcgcgttcccggcaaaccggcggtagcggattagggttagcgatcgtgaaacatgcggtgaatcatcacgaaagtcgcctgaatattgagagtacagtaggaaaaggaacacgtttcagttttgttatcccggaacgtttaattgccaaaaacagcgattaatccgcctttgtcatcttttattgccataagccagccgatgctggcttattttctttgcagtcaaaatatgggcgttagattttacaacggttggtgattttttgttcgcatgattagccatgtctttttcacggaaatagtgttttatactggttggtgatttcttatcgctatatacctctggtttttagatccctccttgctttaaaacgttataagcgtttaaattgcgcttcaggtgctgtcatactgactgcattaacgcggtaaatcgaaaaactattcttcgccgcgcctggttgggagtatttcccgctaaaattgtttaaatataccgctgtatcatccccagggattggcacaaaaatttaacgttacaacaccacatccacaggcagtatgatttatgacccatcaattaagatcgcgcgatatcatcgctctgggctttatgacatttgcgttgttcgtcggcgcaggtaacattattttccctccaatggtcggcttacaggcaggcgaacacgtctggactgcggcattcggcttcctcattactgccgttggcctgccggtattaacggtagtggcgctggcaaaagttggcggcggtgttgacagcctcagcacgccaatcggtaaagtcgctggcgtactgctggcaacggtttgttacctagcggtggggccgcttttcgctacgccgcgtacagctaccgtttcttttgaagtggggattgcgccgctgacgggtgattccgcgctgccgctgtttatctacagcctggtctatttcgctatcgttattctggtttcgctctatccgggcaagctgctggataccgtgggcaacttccttgcgccgctgaaaattatcgcgctggtcatcctgtctgttgccgcgattgtctggccggcgggttctatcagcacggcgactgaggcttatcaaaacgctgcgttttctaacggcttcgttaacggctatctgaccatggatacgctgggcgcaatggtgtttggtatcgttattgttaacgcggcgcgttctcgtggcgttaccgaagcgcgtctgctgacccgttataccgtctgggctggcctgatggcgggtgttggtctgactctgctgtatctggcgctgttccgtctgggttcagacagcgcgtcgctggtcgatcagtctgcaaacggcgctgctattctgcatgcttacgttcagcacacctttggcggcggcggtagcttcctgctggcggcgttaatcttcatcgcctgcctggtaacggcagttggcctgacctgtgcttgtgcagaattctttgcccagtacgtaccgctctcttatcgtacgctggtgtttatcctcggcggcttctcgatggtggtttctaacctcggcttaagccagctgatccagatctccgtaccggtgctgaccgctatttatccgccgtgtatcgcactggttgtattaagttttacacgctcatggtggcataattcgtcccgcgtgattgctccgccgatgtttatcagcctgctttttggtattctcgacgggatcaaagcatctgcattcagcgatatcttaccgtcctgggcgcagcgtttaccgctggccgaacaaggtctggcgtggttaatgccaacagtggtgatggtggttctggccattatctgggatcgcgcggcaggtcgtcaggtgacctccagcgctcactaaatcactgaacatttgttttaaccacggggctgcgatgccccgtggttttttattgtgttgatgggttaggaattgatggaaagtaagaacaagctaaagcgtgggctaagtacccgccacatacgctttatggcactgggttcagcaattggcaccgggctgttttacggttcggcagacgccatcaaaatggccggtccgagcgtgttgttggcctatattatcggtggtatcgcggcgtatatcattatgcgtgcgctgggggaaatgtcggtacataacccggccgccagctctttctcgcgttatgcgcaggaaaacctcggcccgctggcaggttacattaccggctggacctactgctttgaaatcctaattgtcgccatcgccgatgttaccgcttttggtatctatatgggtgtctggttcccgacggtgccgcactggatttgggtactgagcgtggtgctgatcatttgcgccgtaaacctgatgagcgtgaaggtattcggtgagctggaattctggttctcgttctttaaagtcgccactatcatcatcatgattgtcgccggtttcggcatcatcatctgggggattggcaacggcgggcaaccgaccggtattcataacctgtggagcaacggcggcttcttcagtaacggctggcttggcatggtaatgtcgttgcaaatggtgatgtttgcttacggtgggatcgaaattatcgggattaccgccggtgaagcgaaagatcctgagaaatcgataccgcgtgcgattaactccgtgccgatgcgtattctggtgttctacgtcggtacgctgttcgtcattatgtctatctacccgtggaatcaggttggcactgccggtagcccgttcgtgctgacgttccagcatatgggcattacctttgccgccagcattcttaactttgttgtgctgactgcttcgctgtcggcaattaacagtgacgtatttggcgtaggccgtatgctccacggtatggcagagcagggcagcgcgccgaaaattttcagcaaaacgtcgcgtcgcggtattccgtgggttacggtgctggtgatgactaccgcgctgctgtttgcggtgtatctgaactacatcatgccggaaaacgtcttcctggtgatcgcttcgctggcaaccttcgccacggtgtgggtgtggattatgatcctgctgtcgcaaattgccttccgtcgccgtttgccgccagaagaagttaaggcgctgaaatttaaagtgccgggtggggtagcaacgaccatcggcgggctgattttcctgctctttattatcgggttgattggttatcacccggatacgcgtatctcgctgtatgtcggtttcgcgtggattgttgtgctgttgattggctggatgtttaaacgccgccacgatcgtcagctggctgaaaaccagtaatccttgcgttctgtaagccggttcaggaggaaatcctgatccggctattccgaaagttatccgcccccgtcctcctcccccaaatatccttcagatgatgagtgatcctgcattaggctatggcaaggtgatcagattttcatcacaggggaattatgatgttaaatgcatggcacctgccggtgcccccatttgttaaacaaagcaaagatcaactgctcattacactgtggctgacgggcgaagacccaccgcagcgcattatgctgcgtacagaacacgataacgaagaaatgtcagtaccgatgcataagcagcgcagtcagccgcagccaggcgtcaccgcatggcgggcggcgatcgatctctccagcggacaaccccggcggcgttatagtttcaaattgctttggcacgatcgccagcgttggtttacaccgcagggcttcagccgaatgccgccggcacgactggagcagtttgccgttgatgtaccggatatcggcccacaatgggctgcggatcagattttttatcagatcttccctgatcgtttcgcccgtagtcttcctcgtgaagctgaacaggatcatgtctattaccatcacgcagccggacaagagatcatattgcgtgactgggatgaaccggtcacggcgcaggcgggcggatcaacgttctatggcggcgatctggacgggataagcgaaaaactgccgtatctgaaaaaacttggcgtgacggcgctgtatctcaatccggtgtttaaagctcccagcgtacataaatacgataccgaggattatcgccatgtcgatccgcagtttggcggtgatggggcgttgctgcgtttgcgacacaatacgcagcagctgggaatgcggctggtgctggacggcgtgtttaaccacagtggcgattcccatgcctggtttgacaggcataatcgtggcacgggtggtgcttgtcacaaccccgaatcgccctggcgcgactggtactcgtttagtgatgatggcacggcgctcgactggcttggctatgccagcttgccgaagctggattatcagtcggaaagtctggtgaatgaaatttatcgcggggaagacagtattgtccgccactggctgaaagcgccgtggaatatggacggctggcggctggatgtggtgcatatgctgggggaggcgggtggggcgcgcaataatatgcagcacgttgccgggatcaccgaagcggcgaaagaaacccagccggaagcgtatattgtcggcgaacattttggcgatgcacggcaatggttacaggccgatgtggaagatgccgccatgaactatcgtggcttcacattcccgttgtggggatttcttgccaataccgatatctcttacgatccgcagcaaattgatgcccaaacctgtatggcctggatggataattaccgcgcagggctttctcatcaacaacaattacgtatgtttaatcagctcgacagccacgatactgcgcgatttaaaacgctgctcggtcgggatattgcgcgcctgccgctggcggtggtctggctgttcacctggcctggtgtaccgtgcatttattacggtgatgaagtaggactggatggcaaaaacgatccgttttgccgtaaaacgttcccctggcaggtggaaaagcaggatacggcgttattcgcgctgtaccagcgaatgattgcgctgcgtaagaaaagtcaggcgctacgtcatggcggctgtcaggtgctgtatgcggaagataacgtggtggtatttgtccgcgtgctgaatcagcaacgtgtactggtggcaatcaaccgtggcgaggcctgtgaagtggtgctacccgcgtcaccgtttctcaatgccgtgcaatggcaatgcaaagaagggcatgggcaactgactgacgggattctggctttgcctgccatttcggctacggtatggatgaactaacgttttataacgccttgcgtgacgcctgcgccatcatccgcggataaaactgccagaagcgggtttcgagggcgtcataatgagcgtctaaatcgtaccaggagtcacgcagggcatccagacgtgggcggcggcttgccatgccgtttaacacgttctggatgaaatccatatcgcgatagcgcaccagccactgctctgaccacaagtaattgttcagattgataaaacgtggcggtgagtccggcaaaatcgtcatcacttgctcgcgggcataacagacaaattcctgtagcggaaagtccggcgacagctgcgaccagtggcgggaaagaaagtgatcccacatgacatccagcgtaataggcgcaacgcggcgcgtttcactacgaaaccactcccgtgcttcgcggacttccggcagattgtcagtcaatacgtcgatacgtcgatgcatatgaatgccagccacgacgtcgggcggaaaactttcttcaggatttccgcgtacgaaatcagccagtaaattgccggaaagcgagctttccgcgagatgggctaaatgcaggtgagctaaaaaattcatcgattatattctatccaaaagggggtaaaggttgcagggagagcgccccggcactagactacccgcctcttattttagtctgagtcagtgtcatgcgcgttaccgatttctcctttgaattgcccgaatccctgattgcccactatcccatgcctgaacgcagtagctgtcgtttactgtcgctggacgggccgacgggcgcgctgacgcacggtactttcaccgatttacttgataagctcaaccccggcgatcttctggtttttaataatacccgcgtgatcccggcgcgcctgtttgggcgtaaagccagcggcggcaagattgaagtgctggttgaacggatgctcgacgacaaacgcattcttgcgcatattcgcgcctcgaaagcgccaaaacctggcgcagaactgctgctgggcgatgacgaaagtattaacgcaacaatgaccgcgcgccacggcgcactgtttgaagtcgaatttaatgatgaacgctcggtgctggatattctcaacagcatcggccatatgccgctgccgccgtatatcgaccgtccggacgaagacgctgaccgcgaactttatcaaaccgtttatagcgaaaaaccgggcgcggttgcagccccgaccgcaggtctgcattttgacgagcctttgctggaaaaattgcgcgccaaaggcgtggagatggcgtttgtgacgttgcacgttggtgcgggcaccttccagccggtgcgcgtcgacaccattgaagatcacatcatgcactcggaatacgctgaagtaccgcaggatgtggtagacgcggtactggcggcgaaagcgcgcggtaaccgggtgattgcggttggcaccacttcagtacgttcgctggaaagcgcggctcaggcagcgaaaaacgatctcattgaaccgttcttcgacgatacccaaatctttatctatccgggcttccagtacaaagtggtcgatgcgctggtgacgaacttccacttgccagagtcgacgctgattatgctggtttcggcctttgccggttatcaacacaccatgaacgcctataaagcagcggtagaagagaaatatcgcttttttagttacggtgatgcgatgtttatcacgtacaatccgcaggcaattaatgagcgcgtcggggagtaattccgcggcgctggtttaaaacgttggactgtttttctgacgtagtggagaaaaaatgaaatttgaactggacaccaccgacggtcgcgcacgccgtggccgcctggtctttgatcgtggcgtagtggaaacgccttgttttatgcctgttggcacctacggcaccgtaaaagggatgacgccggaagaagttgaagccactggcgcgcaaattatcctcggcaacaccttccacctgtggctgcgcccgggccaggaaatcatgaaactgcacggcgatctgcacgattttatgcagtggaaggggccgatcctcaccgactccggcggcttccaggtcttcagccttggcgatattcgtaaaatcaccgaacagggcgtgcacttccgtaacccgatcaacggcgatccgattttcctcgatcctgaaaaatcaatggagattcagtacgatcttggttcggatatcgtcatgatctttgatgagtgtacgccgtatcctgctgactgggattacgcaaaacgctccatggagatgtctctgcgttgggcgaagcgtagccgtgagcgttttgacagtctcggaaacaaaaatgcgctgtttggtatcatccagggcagcgtttacgaagatttacgtgatatttctgttaaaggtctggtagatatcggttttgatggctacgctgtcggcggtctggctgtgggtgagccgaaagcagatatgcaccgcattctggagcatgtatgcccgcaaattccggcagacaaaccgcgttacctgatgggcgttggtaaaccagaagacctggttgaaggcgtacgtcgtggtatcgatatgtttgactgcgtaatgccaacccgcaacgcccgaaatggtcatttgttcgtgaccgatggcgtggtgaaaatccgcaatgcgaagtataagagcgatactggcccactcgatcctgagtgtgattgctacacctgtcgcaattattcacgcgcttacttgcatcatcttgaccgttgcaacgaaatattaggcgcgcgactcaacaccattcataaccttcgttactaccagcgtttgatggcgggtttacgcaaggctattgaagagggtaaattagagagcttcgtaactgatttttaccagcgtcaggggcgagaagtaccacctttgaacgttgattaatattaataatgagggaaatttaatgagcttttttatttctgatgcggtagcggcaacgggtgcaccggcgcaaggtagcccgatgtctttgattttgatgctggtggtattcggtctgattttctatttcatgatcctgcgtccacagcagaagcgcaccaaagaacacaaaaagctgatggactccattgccaaaggtgatgaagttctgacgaacggtggcctggttggtcgcgtaaccaaagtagcggaaaacggctacattgctatcgcgctgaatgacaccactgaagtagttattaaacgtgacttcgtagctgccgtcctgccgaaaggcaccatgaaggcgctgtaattaaaatttttccctaagggaattgccgtgttaaaccgttatcctttgtggaagtacgtcatgctgatcgtggtgattgtcatcggtctgctgtatgcgcttcccaacctgtttggtgaggatccggctgttcagatcactggtgcgcgcggagtcgccgccagtgagcaaacgctgatccaggtccagaaaacgttacaagaagaaaaaataactgctaagtctgtggcactggaagagggcgctattcttgcgcgcttcgactccactgacacccagctgcgcgctcgtgaagcattaatgggcgttatgggtgacaaatacgtcgtggcgcttaaccttgccccggcaacgccgcgctggctggcagctattcacgctgagccgatgaagctcggccttgacctgcgtggcggcgttcacttcctgatggaagtggatatggacaccgcgcttggcaaactccaggaacaaaatatcgatagcctgcgcagcgatctgcgtgaaaagggcatcccgtataccaccgttcgtaaagaaaacaactacggcctgagcattactttccgcgatgctaaagctcgtgatgaagccattgcgtatctgagcaagcgccatccggacctggtgattagtagccagggcagcaaccagctgcgtgcggtaatgagcgatgctcgtctgagtgaagcgcgtgaatatgcggtgcagcagaacatcaatatcctgcgtaaccgtgtaaaccaacttggcgtggcggagccggtggttcagcgtcagggtgctgaccgtatcgttgttgaactgccaggtattcaggacactgcgcgtgcgaaagagattctgggtgcgacggcaacgctggaattccgtctggtaaacaccaacgttgaccaggccgctgcggcatccggtcgcgtaccgggcgactctgaagtgaaacagacccgcgaaggtcagccagttgtgctgtacaaacgcgtaattctgaccggtgaccatatcaccgactccacttccagccaggacgaatacaaccaaccgcaggttaacatctcgctcgatagcgctggtggtaacatcatgtctaacttcactaaggacaacatcggcaaaccgatggcaaccctgtttgtggagtacaaagacagcggtaagaaagatgcaaatggtcgtgcggttctggtgaaacaggaagaggtgattaacatcgccaacatccagtctcgtctgggtaacagcttccgtatcaccggcatcaacaacccgaacgaagcccgtcagctgtcactgctgctgcgtgccggtgcgttgatcgcgccgattcagattgttgaagaacgtaccattggcccgaccctgggtatgcagaacattgagcaggggctggaggcttgccttgccggtctgctggtttctattctgttcatgatcatcttctataagaaatttggtctgattgcgaccagtgctctgattgccaacttgatcttgatcgtcggcattatgtcgctgttgccaggcgcaacgctgagtatgccaggtatcgcgggtatcgtcttaacacttgcggtagcggtcgatgcgaacgtacttatcaacgaacgtattaaagaagagttgagcaacggacgtactgttcaacaggcaattgatgaaggttatcgtggcgcattcagttctatcttcgatgcgaacatcaccacgctgattaaagtcatcatcctgtacgcagtgggtaccggggcaattaaagggttcgcgattactaccggtatcggtgtggcgacgtcgatgtttaccgcgattgtcggtacgcgtgccatcgtaaacctgctatatggcggcaagcgcgtcaagaagctgtcaatctgaggagtgcgatgtggcacaggaatatactgttgaacaactaaaccatggccgtaaagtctatgactttatgcgctgggactactgggctttcggcatctctggtctgctgttaatcgccgctatcgttattatgggcgtgcgcggctttaactgggggctggatttcaccggtggtacggttattgaaattacgctcgaaaaaccggctgaaattgacgtaatgcgtgatgcattgcaaaaagccggttttgaagagccgatgctgcaaaactttggtagcagccatgacatcatggtccgtatgccgcctgctgaaggcgaaaccggcggtcaggtgttgggcagccaggttctgaaggtgattaacgaatccaccaatcagaatgcagcagtgaagcgtattgagttcgtcggtccgagcgtgggggcagaccttgcgcaaaccggtgcgatggcgttgatggcagcgctgctgtctatcctcgtgtacgtaggtttccgctttgagtggcgactggcggcaggggtggttattgcgctggcgcacgacgttatcattacgctgggtattttgtcgttattccatatcgagattgacctgaccattgtggcatcgttgatgtcggttatcggttactcgcttaacgacagtatcgtggtatcggaccgtattcgtgaaaacttccgcaagatccgtcgcggtacgccttacgaaatctttaacgtgtccttgacccagacgctgcaccgtaccttgatcacatccggtactaccttgatggttatcctgatgctgtacctcttcggtggtccggtactggaaggcttctcgctgaccatgcttatcggtgtttccatcggtactgcatcttccatctatgtggcatctgcgttggctctgaaactgggtatgaagcgcgaacacatgttgcagcagaaagtggaaaaagaaggggcggatcagccgtcaattctgccgtaatcaagttcccgttgatgttgaaaatcccggtcagaagatcgggattttttttgatgtatggagattgcgaaaatccccgcatcttgggaaactgcgcgtaaccctacatttcatccaggtaacttttcatggctatcatcccaaaaaactatgcgcggttagaaagcggctatcgcgaaaaagcattaaaaatctatccgtgggtctgcggtcgctgttcccgcgagtttgtttattccaacctgcgtgaacttaccgttcaccacattgatcacgaccataccaataacccggaagatggcagtaactgggaattgttgtgtctctattgccacgatcatgagcattcgaaatataccgaagcggatcagtatggtacgaccgttatcgcaggggaagatgcgcagaaagatgtcggtgaagcgaagtacaacccattcgctgacctgaaagcgatgatgaacaagaagaagtgattaaaacgtaaaattgcctgatgcgctacgcttatcaggcctacgttatttcagcaatatattgaatttacgtgcttttgttggccggacaaagcgtttacgccgcatccggcatgaacaaagcacacgttgttaacaatcagaaatgccgggaataaatcccggcattttcataatcagaagttgtaacctactaccaggtaaccaccccagccggtagagcgaacgttgaagttgccgttgccgaagttcagttctgcatcgtcgttccactgaccaccgtcgtgccagtaacgagctacgacagagtagtgccagtgatcgtagttcagagccagaatatggctggaagcgatagagttattagtacgggtcttaataccgttgattgcgttaccgctgtcatcccctaaatcggaaccccagtcgaagttggtgaagccgatgtagctcagctgaccgccccacagatcggtaatcggcacaaagtatttaattttgaaacggtaaccgtcccactcgttttcgttcgctgcgccatagttctgccactggtatttcgcatagacgttcatggacaggctcatcggcaggccagtgtcgatatcggtacccagacccatgtaccaggtgctctggcgaccatctttattacgacccatgtcgtaaatgtagttgttcgcgaagtaccactctttgaacggaccgaagctaaggtcagtattggtcagcttgtcgatggagaaacgtggttcgatttccataaacagcggagaaccgtggttccagataccttttgcatcggagttaccgccgaagaataccggcgcatccgcataaccatagaagtcgaaccagtcttttttagcgaatgcttcgtactcaaggtaggtatcgttgcggatctgcggtccgaaacgggtgtgatagcttccgacaacgttaacgctctggtgccaccagtcggaaagatactgcggtttgtcgttttcagctgcgttgacagtaaaagacgaagagagcgccagtaccgcaccggctgccagtaatgtttttttcatatgtatgccactgtttgaaaatcccttgcgggagtgaaaaaggcgcaaattgcgtttctaaatatttcgtatacagaggagcctattataaaaatcattgctcacaaaaatatgtttcgtttcacagttctatcatttacgtaatcgattgcgttcacgtttacacacattcgggcagggattgtactgactttcacccttgttgcaaacttttactatcaatctgggtgatgtaagcggagtaacaaaatgacggggaaagatgttgcgggacgcacaaaattgccccgcaatacgtttaatgcataacaggttgaatgtcgtggatacgtacaaagcctaattgatccacagaaatcccctttaactgtaacggaatatcaacatcgctgggggcaaggacgctggcaggggcattaatcaattgattctgcacattgatttcctgaaagttgtctattgttccctgaatttgcccatattcaacagttccgctgaatgcgggcaagggatcattcgactcgccctgaatacgtagcgtcagggtggtgccatctgtatcaggcgtaatattcaccagcgacatacgtaaagtaccgatctggctttccagtcttgccggtgttttcgctccaggcagaaggtaaaccccactgctggattttgcattcagcctgttttgctgagtgattttgactgtttcttgattgagttgcgtcatctcctggttcagcgtgctgacgctgtgtttcatctgtcgcacttcactttgctgcacacaggcgctaaggctgaacaggcttcccagcaggagcagtcgaaaaacgttagtattcataggtcgtcccttgctcgtcgcaattagcctaatggtagagggtaaaagcagcgaaagcatcgatcctttatctcaaaagcgttgcgcctttgttgtatcgtcagttcagggtaaaatagatttccgttaaccacctggtcaggacgccgtatgcattgcccattctgtttcgccgtggacactaaggtaattgactctcgtctcgtgggcgagggttcatctgtacgccgccgtcggcagtgtctggtgtgtaatgaacgtttcaccacctttgaagtggcggagctggttatgccgcgtgttgtaaaaagcaacgacgtgcgtgaaccgtttaatgaagagaaattgcgtagcggaatgctgcgggcgctggaaaaacgtccggtgagttccgatgacgtcgaaatggcaatcaatcatattaaatcgcagctgcgcgccaccggtgagcgcgaagtgccgagcaagatgattggcaatctggtgatggagcaattgaaaaagctcgataaagtcgcctatatccgttttgcctctgtctaccgcagtttcgaagatatcaaagaatttggcgaagagatcgcgcgcctggaggactaagccgtgcaggacgagtattacatggcgcgggcgcttaagctggcgcagcgggggcgttttaccactcatcccaacccgaatgttgggtgtgtcattgtgaaagatggcgaaatcgtcggtgaaggttaccatcaccgtgctggtgaaccacacgccgaagtacatgcgttgcgtatggctggagaaaaagccaaaggtgcgactgcgtatgtgacactcgaaccttgcagccatcatggccgtacgccgccttgctgtgatgcattaattgccgcaggtgtggcgcgcgtggttgcctcgatgcaagatcctaacccgcaggtagccgggcgagggctatatcgcctgcaacaagcgggtattgacgtcagccacggcctgatgatgagtgaagccgaacaattgaataaaggctttctcaagcggatgcgtaccggctttccttatatccagttaaaacttggcgcatcgcttgatggtcgtacggcgatggccagcggtgagagccagtggattacttcacctcaggcgcggcgcgatgtacaacgcctgcgcgcgcaaagtcatgccattttaaccagtagcgctacagtactggcagacgatccggccttaacggtgcgttggtctgaactggatgaacaaactcaggcactttatccgcaacaaaatctacgccagccggtacgtattgtcattgatagccaaaatcgtgtgacgcctgaacatcgtatcgtgcagcagcctggcgaaacctggtttgcgcgtacacaggaagattctcgtgaatggccggaaacagttcgtagtttgctcatcccggaacataacggacatctggatttggtgctgctcatgatgcaactgggtaaacagcagattaacagcatctgggtggaagcggggccaacgctcgctggcgcattgctgcaggcgggtttagtcgatgagctgattgtctatatcgcacctaaactattaggcagcgacgcccgtggattatgctcgctgccagggcttgagaaattagccgacgccccccaatttaaattcaaagagatacgtcatgtaggcccggatgtttgcctgcatttagtgggtgcatgatctcccggctcgaaagggaagcagcgcacaaaatattatgctaaaatccgcccccctgcggggccatactcgaacccgaaggaagaaaatgaacattattgaagctaacgttgctaccccggacgctcgcgtcgccatcaccatcgcgcgtttcaacaactttatcaatgacagcctgctggaaggtgcaattgatgcactgaaacgtatcggtcaggtaaaagatgaaaacattaccgttgtttgggtgcctggtgcctatgagctgccgctggcggcgggtgcactggctaaaaccggtaaatacgacgcggtgattgcgctgggtacggttattcgtggtggcactgcccattttgaatatgtcgctggtggtgcaagcaacggcctggcgcatgttgcccaggacagcgaaattccggttgcttttggggttctgaccactgaaagcattgaacaagcgatcgaacgtgctggcaccaaagctggcaacaaaggtgcagaagctgcactgaccgcgcttgaaatgattaatgtattgaaagccatcaaggcctgaaattagtaaggggaaatccgtgaaacctgctgctcgtcgccgcgctcgtgagtgtgccgtccaggcgctctactcctggcagttgtcccagaacgacatcgctgatgttgaataccagttcctggctgaacaggatgtaaaagacgttgacgtcctgtacttccgtgagctgctggccggggtggcgactaataccgcatacctcgacggactgatgaagccatacctgtcccgcctgctggaagaactgggacaggtagaaaaagcagtactgcgcattgcgctgtacgaactgtctaaacgtagcgatgtgccatacaaagtggccattaacgaagcgatcgaactggcgaaatcgttcggcgcagaagacagccataagttcgtcaacggcgtactcgataaagcagcacctgtgattcgccctaacaaaaagtaatatccaggccggtagattcacggaagactgttccatgatcgccggccttttcttttttacctgctgaggcataacgtatggcatgtggcgagttctccctgattgcccgttattttgaccgtgtaagaagttctcgtcttgatgtcgaactgggcatcggcgacgattgcgctcttctcaatatccccgagaaacagaccctggcgatcagcactgatacgctggtggcgggcaaccacttcctccctgatatcgatcctgctgatctggcttataaagcactggcggtgaacctaagcgatctggcagcgatgggggccgatccggcctggctgacgctggcattaaccttaccggacgtagacgaagcgtggcttgagtccttcagcgacagtttgtttgatcttctcaattattacgatatgcaactcattggcggcgataccacgcgtgggccattatcaatgacgttgggtatccacggctttgttccgatgggacgagccttaacgcgctctggggcgaaaccgggtgactggatctatgtgaccggtacaccgggcgatagcgccgccgggctggcgattttgcaaaaccgtttgcaggttgccgatgctaaagatgcggactacttgatcaaacgtcatctccgtccatcgccgcgtattttacaggggcaggcactgcgcgatctggcaaattcagccatcgatctctctgacggtttgatttccgatctcgggcatatcgtgaaagccagcgactgcggcgcacgtattggcctggcattgctgccgttttctgacgcactttctcgccacgttgaaccggaacaggcgctgcgctgggcgctctctggtggcgaagattacgagttgtgtttcacggtgccggaactgaaccgtggcgcgctggatgtcgctttgggacatctgggcgtaccatttacctgtatcgggcaaatgaccgccgatatagaaggactctgttttgttcgtgacggcgaacctgtcacgttagactggaaaggatatgaccattttgccacgccataaagatgtcgcgaaaagtcgcctgaagatgagtaatccgtggcatctgcttgctgtcggattcggaagtggattaagcccgatcattcctgggacgatgggatcgctggcagcgattccgttctggtatctgatgacctttttgccctggcagctctattcgctggtggtgatgctggggatctgtatcggcgtctatctttgtcatcaaacggcgaaagacatgggtgtgcacgatcatggcagcattgtctgggacgaatttattggtatgtggatcacgctcatggcgctgccgaccaatgactggcagtgggttgccgccgggtttgtgattttccgtattctggatatgtggaagccgtggccgatccgctggtttgatcgcaatgtgcatggcggcatggggatcatgatcgacgatattgtcgccggggtgatttccgcaggcatcctgtattttatcggtcatcactggccgctgggtattctgtcgtagttgtgcaccgatgcctgatgtgacgcttgtcacgtctcatcaggcctggactcttatttaaatcctacgacaggatgcggtttatacggcgtttccagttcggcaatctgttccggcttcaaagtgatatccaccgcgttcaatagctcatcaagctgttcttcgcgcgaagttccgataatcggtgcggcaatgcccggtttactcaacaaccaggccagcgcaacttgtgctcgtgtcgcccccagttcttcactgacgcctgttaaccgctctgcgatctgcgcgtcattttcatcgctttctttatagagatttttccccacctcatcagacaccagtcgtgcggtagtttctccccacggacgcgtcagacggccccttgccagcgggctccatggaattaccgccacgccctcctgataacacagtggtagcatctcgcgctcttcttcacgataaatcagattgtagtgatcctgcatactgacaaactgcgcccagccgtgctgtttttggagttccagtgcctgagcaaactgcgaagcgtgcattgatgacgcgccgatataacgcgctttcccggcttttaccacgtcgttgagggcttccagcgtctcttcgatcggcgtgttgtaatcccagcgatgaatttgcaggatatcgacataatccatgccgagacgtcgcaggctgtcgtcgatagagcgcaaaatttgcgcacgggataatccttccggtaaatcaccaacgcgatggaacactttggtcgcaacgaccacgtcttcacgacgggcgaaatcccgcagtgcgcgaccgacgatctcttcgctgctgccgtcagaataactgttggcggtatcaaagaaatttatgccgccttccagtgcacgtttaattatgggacggctgctttcttccggcagtgtccatgcgtgattaccgcgatctggctcgccaaaggtcatacagccgaggcaaagtcgggaaacgcgaaggtcggtttttcctaaggggttgtattgcatgctgccactcctgctatactcgtcatacttcaagttgcatgtgctgcggctgcattcgttcaccccagtcacttacttatgtaagctcctggggcttcactcgtttgccgccttcctgcaactcgaattatttagagtctatgaataatttcttaagcatagcaggagtggagtagggattatgccagccaggccttgattttggcttccataccagcggcatcgaggccgagttcggcgcgcatttcttcctgagttccttgcggaataaagaagtccggcaggccaatgttcagcacgggtactggtttacgatgggccatcagcacttcgttcacgccgctgcctgcgccgcccataatggcgttttcttctacggtgaccagcgcttcatggctggcggccatttccagaattaacgcttcatcaagcggtttcacaaaacgcatatcgaccagcgtggcgttcagcgattcggcgactttcgccgcttctggcatcagcgtaccaaagttaaggatcgccagtttctcgccacgacgcttcacaatgcctttgccaattggtagtttttccagcggcgtcagttccacgccgaccgcgttgccacgcgggtagcgcaccgctgacgggccatcgttatagtgatagccggtatagagcatctggcgacattcgttttcatcgctcggggtcataatgaccatttccggtatgcagcgcaggtaagagagatcaaaagcaccctgatgggtttgaccgtcagcaccaacaatgcccgcgcggtcgatggcgaacaggaccggaagcttttgaatcgccacgtcatgcagcacctgatcataggcgcgttgcaggaaagtggagtaaatcgcgacaatgggtttgtacccaccaatcgccagacccgcagcaaaggtcaccgcgtgttgctcggcaattgccacgtcgaagtagcgatccgggaatttacgtgaaaactcgaccatgccggaaccttcacgcatcgccggagtaatcgccatcagcttgttgtctttcgctgccgtttcgcacaaccagtcgccaaagatttttgaatagctcggcaaaccgccgctacttttcggcaaacaaccgctggagggatcaaatttaggcacggcgtggaaagtgattgggtctttttctgccggttcataaccacgaccttttttggtcatgatatgcaggaactgcgggcctttcaggtcgcgcatgttcttaagcgtggtgataagccccagcacatcgtgaccgtcaaccgggccgatgtagttaaagcccagctcttcaaacaacgtgccaggcactaccatgcctttaatatgttcttcggtgcgtttgagcagctctttaattggcggaacgccagagaaaacttttttcccgccttcgcgcagtgaagagtaaagcttaccggaaagcagctgcgccagatggttgttgagcgcgccgacattttcggaaatcgacatttcattgtcgttgagaaccaccagcatatcaggacggatatcgcccgcgtgattcatcgcttcaaacgccatgcctgcggtaatcgcaccatcgccgattacacagacggtgcggcgatttttgccttctttctcggcagcaaccgcaataccaattccggcactgatggaggttgatgaatgcccgacgcttaatacgtcatattcgctttcgccgcgccacgggaacgggtgcagaccgcctttctgacggatggtgccgattttgtcgcggcgtccggtcaaaattttatgcggataagcctgatgccccacatcccaaatcaattggtcaaacggggtgttgtagacatagtgcagcgccacggtcagttcgaccgtgcccagcccggaggcgaagtgcccgctggaacggctcacgctgtcgagtaaatagcggcgcagttcgtcgcagagtttcggtaaactctctttcggcaacagtcgtaactcctgggtggagtcgaccagtgccagggtcgggtatttggcaatatcaaaactcatcaggggcctattaatacttattgtttatttattacgctggatgatgtagtccgctagcgcttccagtgccgaggtatcgagtgactgttcagccagttgtttcagcgactgacgggcatcgtcgatcagatcccgggctttcttccgggcttgctcaagacccagaagtgcagggtaggtacttttaccaagttgctggtcggcaccctggcgttttcccaacgttgcagtatctcccaccacatccaggatgtcatcctgaacctggaaggcaaggccgatgctctctgcatacttgtcgagtaccggcagagcacgacgtcctttatctccggcgcttaatgcaccaaggcgaacggcggcgcgaatcaatgcgccggttttatgacgatgaatacgctcaagcgcgtccagaggtacgtgtttgccttccgcgtctaaatctaatgcctgaccaccgcacattccggcaataccactggcgctcgccagttcagaaatcatcgaaattctgtcgcggtccgacacttccggcatatcggcatcgcttaaaatcgagaacgccagcgtttgtaaagcgtcgccagcgagaatcgcgtttgcttcgccaaacttcacatggcaggttggcaaaccgcgacgcagatcgtcatcatccattgccggtaaatcatcatgaattaatgagtaagcgtggatacactcaacggcggcagcgggtgcgtccagcgtgtttgtgctaacgccgaacatatgaccggtggcataaaccaggaaaggtcgcaggcgcttaccacctaataatgcgccatactgcatggtttcgaccacgggagtgttctgaaagggcagtggggcgataaaacggctcagcgcctggttggcctgcttaacgcaggcttcgagttgctgcggaaagtccattactcattgtccggtgtaaaaggggttagagaggcgtcttcattgtcagacagcagaatttgtacgcgctgttcggcttgttgtaatttggcctgcccctgacgtgccagctgcacgccgcgttcgaactcgttcagcgcctcttccagcggcaggtcgccactttccagacgggttacaatctgttccagctcgctcagcgccttttcaaagctggcgggcgcctcatttttcttcggcataatgaatgtctgactctcaatatttttcgccccgtcatggtaacggactcagggcaaatagcaaataacgcgcaatggtaaggtgatgtgcacagcaaagcgatgttagtggtatacttccgcgcctggatgcagccgcaggtgtgggctgctgtatttttccctatacaagtcgcttaaggcttgccaacgaaccattgccgccatgaagtttatcattaaattgttcccggaaatcaccatcaaaagccaatctgtgcgcttgcgctttataaaaatccttaccgggaacattcgtaacgttttaaagcactatgatgagacgctcgctgtcgtccgccactgggataacatcgaagttcgcgcaaaagatgaaaaccagcgtctggctattcgcgacgctctgacccgtattccgggtatccaccatattctcgaagtcgaagacgtgccgtttaccgacatgcacgatattttcgagaaagcgttggttcagtatcgcgatcagctggaaggcaaaaccttctgcgtacgcgtgaagcgccgtggcaaacatgattttagctcgattgatgtggaacgttacgtcggcggcggtttaaatcagcatattgaatccgcgcgcgtgaagctgaccaatccggatgtgactgtccatctggaagtggaagacgatcgtctcctgctgattaaaggccgctacgaaggtattggcggtttcccgatcggcacccaggaagatgtgctgtcgctcatttccggtggtttcgactccggtgtttccagttatatgttgatgcgtcgcggctgccgcgtgcattactgcttctttaacctcggcggcgcggcgcatgaaattggcgtgcgtcaggtggcgcattatctgtggaaccgctttggcagctcccaccgcgtgcgttttgtcgctattaatttcgaaccggtcgtcggggaaattctcgagaaaatcgacgacggtcagatgggcgttatcctcaaacgtatgatggtgcgtgccgcatctaaagtggctgaacgttacggcgtacaggcgctggtcaccggcgaagcgctcggccaggtgtccagccagacgctgaccaacctgcgcctgattgataacgtctccgacacgctgatcctgcgtccgctgatctcttacgacaaagagcacatcatcaacctggcccgccagattggcaccgaagactttgctcgcacgatgccggaatattgtggtgtgatctccaaaagcccgacggtgaaagcagttaaatcgaagattgaagcggaagaagagaagttcgacttcagcattctcgataaagtggttgaggaagcgaataacgttgatatccgcgaaatcgcccagcagaccgagcaggaagtggtggaagtggaaaccgtcaatggcttcggcccgaacgacgtgatcctcgatatccgttctatcgatgaacaggaagataagccactgaaagtcgaagggattgatgtggtttctctgccgttctataaactgagcaccaaatttggcgatctcgaccagaacaaaacctggctgctgtggtgtgagcgcggggtgatgagccgtctgcaggcgctctatctgcgcgagcagggctttaacaatgtgaaggtatatcgcccgtaatttgtggtttttacgtcgcatctggtcagatgcgacgtttgccgcatccgacactactcgtaataattataaatccctgccgccatcaccagttgtgatgccacttcatgggctttttcacgcccaaccaacaggtcgataattttcagaccaaagtcgatagctgtacccggcccctggctggtcagcaattttacccgtgcatcccagacgacgcgcttgtccagccattgttcggcgggaattttgtctttcagcgtcgggaagccggtcatattaccaatcgggaagatatcgtgcggcaccagcacggtggctggcgcggcgcaaatagccgcgacgatacgcccggaacggtggaactgtttaacggtttcaaccagcagagtgctatcgcgaaaacactccgcgcctttaatgccaccaggcagcacgatcacgtcatattcgccatcagccacttcgaccagcggcgcatccgccagcagcttcacgccgcgcgagcaggtaatcgccaggttaccatcgctggcgacgctggcagtggtgactttgataccgccgcgaaccagcagatcgatagtggtgacggcttcagtctcttcactaccaggggcgaggcaaaccagtgccgatgcgctcatattcactctcctttctttttaccatttcaaacaggcgggtgttttccggtacggcaatcccatgcgcgcgggcgcggcgtaagagaaaaccattgatatagtcgatttcggtgtggcgcagcgcgcggatatcctgcaacatcgacgagatattttccgctgtggcatcaatcacctgcatcacgtaatcacgcaaatcttccgctgaagtatgatgcccttcgcgctcgatcactgccgcgacttcttcgcatatttgcataatttcttgcggatgatgacgtaattcaccgttcgggcaattccagatggcagtcagtggattaatcacgcagttgactgccagcttgcgccacagctcggcgcgaatattgttatgccaggcaacgtcaggcaacacggtttgcaaaatatccgccagataactgtaatccccgtcctgttgccgtgccgggccaatatgcgtgataccgtttgccacatgaataatgacattgccgtcgcggcgggctgcatgggtggtggtgcccatcagtaatggctgctgaatgttttgcaactcttcgatggtgcccatgccgttgtgaattaacagtattggcgtagttacaggcagtgtggacgcgaggcttttgacggcatcggaaacctgccatgctttcagcgtcaccaggagcagatcgctggtggcgagaaaatcgggatcgttggcggtcagcgattcgttaaatatcgaaccatctgtctcaaccagattcacgctacaataaggttgcggtacgcgcagccagccctgaacttcatgaccctgtttgcaaagtgctgtaagccataattgccctaaggcaccgcatcccaatacggtaattttcattgttcctcctcacccgcaaccactccgggtgttcaataaggctatcccttaattgtgcatgctgttgcgactatgcacaattaagggatacgtcctggtgcaggactgtcggttatttaactttgcgggtattatgcttcgcatcaaaaatgaagggagaggaaaagatgccatctttcgatattgtctctgaagttgatcttcaggaagcacgtaacgcggtcgataacgcgagccgcgaagtggagtcccgttttgacttccgtaacgttgaagcctcatttgagctgaacgacgccagcaaaaccatcaaagtgttgagcgagtccgatttccaggtcaatcagttgctggatattctgcgtgccaagctgctgaagcgcggcattgaaggcagttcgctggatgtaccggagaatatcgttcatagcggtaaaacctggtttgtggaagcgaaactgaaacagggcattgagagcgcgacccagaagaaaatcgtcaagatgatcaaagacagcaaactgaaagtgcaggcgcaaattcagggcgatgaaatccgcgtaacgggcaaatctcgtgatgatttgcaggctgtcatggcgatggtacgtggtggcgatctcggtcagccgttccagttcaaaaacttccgcgattaatcgcgactatgtgcgttttgttcatgtcagatgcggcatgaacgcctgattcggcctacaaaggtttgtaattcagaaactttgtaggcctgataagcgtagcgcagcaggcaattcgccgcgttttttatgcctgacgaattgcctgttctatctcaaagcgattcgtcactttgctgtcgattttcacataagctgaatgttcttcttctgcaatcaacacttctttgatgccttcagtttctagcaaacgcacttttaacgcctcgtttgcggcaatgttcgccgggatttcaatgcgcaaactgctgacatacggcggttctttcatggtactggcgactgtcagccacactgcggccagcattgcgccagcgagaaataccccctgaccgtcaaacatgccgttaatccagccgcccagcgaaccgccaatcgccacgccaagaaactggctggtggagtaaacacccatcgccgtacctttgtaacctgctggcgactctttactgataagtgagggcaggagggcttccatcaaattaaacgccacaaagaaaagctgcacgccgaccaccagttgccagaactgcgtttgcgcgttccacaacacaatttccgcaaccacgatcaacccgacgcagaagacaaagacttgcttcattttgcgcttaacttcagcgtagataatgaaaggcacgaccgagccaaaggcgattagcattgtcgccagatagaccttccagtgttcagccgccgggaaccctgcatcagccagttgtccgggcagggcaacaaacgtcgacatcagcaaaatatgcagacacataatgccaaagttgagtttcagcagccgcggttccgccagcactttactgaaactgcctttcaccattccggactcacgattaagtacgtgagtgctactgttgggcacaacccaaatggtcaacgcaatgccggtcgttgccagaatagcgatcatccagaacagcgcgtgcagcccaagtttgtgagtgatgatcgggccaagcaccatcgcaatggcaaaggtaatgccaaagctcacgccgataaacgccatcgctttggtgcggttttgttcgcgcgtgagatcggaaagcagcgccataacggcggcggcaattgctccagagccttgtagcgcccggcccagaataattccccagatggagtcggaaagcgcagcgataacgctaccggcggcaaacaccgccagcccaccgacaattaatggtttgcgaccaatgcggtcggaaagcaggccaaacggaatctgaaaaacggcctgagtcagaccataaataccaatggcaataccgattaatgcttcgctggcaccttgcagagccatgccgtacgtggtcagaaccggcagaaccataaacatgcccagcatgcgcaacgagaatacggtccctaaaccccaggtcgcgcgcctctcacctggcgtcattttataatcgttcattaccacctctgttttaaattcgcgactagtgtaaagcggcaaacgaatggggtaaacatgcggattttttagtaaatatttcgagagggatatgtttctaatgctaagaaaaaaggtgccgtagcacctttttaatagagaggttttgttaccacacagcagccagcagcgtatgcgagtccggtaccataaaatcaacggacatcatcaccgagagggcagtgatggcgatgatagagaagccgaacagcttgcgcgcccagattctgtcatcagcaactttataaccgcgcagagccatacctaaccaccagacgctaaccgccgcggcgaccaccagatatttatacccagcgtaaccgccaagagagagcatcagcgtggcaacggcaaaggcgatgatatacagcgtgatgtgattcttcgccaccgaaatgccttttaccactggcaataccggaatgtttgccgcctggtaatccttaaagcggaaaatggcgatggcataggagtgaggcatctgccacaggctgaagatagccagcaggatcgctgcgccgctatcgaactcaccggttaccgcacagtagccgatcaccggcggcgcagcgccggagagcgaaccaatcaacgtgccgtagacagagtggcgtttcatgtacaggctataaacgccgacataaaccacaaagcccatcacccccagccagcaggccagcggattcgcgccaaaccacagcagcataaagccagcaatacccagcaacgtggcgtacaccagcgagacagcaggagagatcaggcctttcaccagcacccgattcttcgtcctttccatctttctgtcgatatccctgtcgatgtagttgttaaacacacaacccgacgccacaaccagtgacaccccaaccagcgtgtagataaacaggggataatcaatgctgccctttgaggccagcaggaatcccccaatcaccgagatcaggttgccaaagatgatgcctggtttcgttacttgcaggtattgcttaaacatcataaccgccgctcttagtgcatcatcatgttgtagttgaggttccacataatccagatggagcctacaaccaggatagcgatgattagcacggtgaagacaaacgccgtcatgttccagccttcatctgatttggtattcatgtgcaggaagcacaccagatgcaccagaacctgtaccactgccattgccaggattgttcccagaattacggccggagaggcagctcctgtcatcaccatccagaacggaatcaccgtcagaatgatcgacaggataaagcctgtcatgtaggtttttacgctgccatgggacgcgccgctgtgatcggtagaatgactcattacatcgcccccatcagataaacaacagtgaacacacagatccaaaccacatccaggaagtgccagaacaggctcaggcacatgatgcgggtacggttagtgctggtcaggccgcgacgggcgatttgcaccatcagcaccgccatccagataagaccagaagtgacgtgcagaccgtgcgtgccgaccagcgcaaagaacgctgacaggaagccgctgcgatccggacccatgccgttaacaatcaggtgatggaattcatagatttccatcccgataaatccggcaccaaacaaccaggtcaacgccagccaggagataacctggcttttgttgtttttgtacatggcgatagccgccatgccgtaggtgatggagctgaacaacagcaagaaagtttcaaccagaacgaacggcagttcgaaaatgtccttacctgtcgggccgcctgcggtgccgttcaccagaacggcataggtagcaaacaagatagagaacagaatgcagtcgctcatcaggtagatccaaaatccgaagattttggttccgcctgcatcgtggtgcccgtgttcgtgcgcgtgggcagtcgcgtgcgtcaaagtatcagttgccatttttcagccctgccttagtaatctcatcgaaatgctggttttccagtttttcgatttctgccaccggcacgtagtaatccacgtcctcgtcgaagcttttcacgatccaggtgatgatcatgcctgcgaagccaacaatcgccagccaccagatatgccagatcatggcgaaaccgaagatggtggagaaagctgcaatgacgatacctgcaccgctgtttttcggcatatgaatttcttcatagtggtcaggctttttatacgcttcgcctttctctttcatttcccagaatgcatcacgttcgtgaacgtgcggcactacggcaaagttatagaacggaggcggggaagaggttgcccactccagcgtacggccaccccacgggtcgccagtcaggtcacggttctggtcgcggtcgcgaatagaaacgtacatctgaataacgaggcagagaatacccagcgcaatcagtactgcaccgctggctgcaatcatcagcatggtgtggaactgcgggtcaatctgctggctcaaacgacgggtcatgcccatgaagcccagcgcatacagtggcataaaggcaacgaagaagccgatgatccagaaccagaacgcgcgtttaccccaggtttcgttcagtttgaaaccgaacgctttaggccaccagtaggtcatccctgcgaagcagccgaagaccacgccgccgatgatcacgttatggaagtgcgcaatcaggaacaggctgttatgcagaacgaagtccgcgcccggtacggccagcagcacgccagtcatcccgcccaccgagaaggtgacgataaaaccgatggtccacagcatcgcagaatggaacacgatgcggccctgatacatggtgaacagccagttgaagatcttcaccccggtcgggatggcgataatcattgtggtgataccaaagaaggcgtttacgttcgcgcccgcacccatcgtaaagaagtggtgcagccaaacgatgaacgacagcacggtgatacagacggttgcccataccagcgaggtataaccaaacagacgtttacgcgagaaggttgccgcaatttcggagaacacaccgaaaacaggcaggatcaggatgtaaacttccgggtggccccaggcccaaatcaggttgatgtacatcatcatgttgccacccatatcgttggtaaagaaatgggtgcccagatagcgatccagggtcaacaacgcgacggtaaccgtcagaattgggaaggaagcaataatcagtacgttcgcgcacagtgatgcccaggtaaatactggcatcttgaacatggtcatgcccggtgcgcgcatcttcagaatggtaacgaagaagttgataccggtaagcgtcgtacctataccggatagctggagactccatatccagtaatcgacaccgactcccggactgtactctattcccgatagcggtggataggccagccagccggtctgcgcaaattcgcccacgccgagagaaacgttaaccagaatcacaccaacaacggtaaaccagaagcttaagttgttgaggaacgggaacgcaacgtcacgcgcgccgatctgcagcggaaccaccaggttcatcagaccgataacgaaaggcatcgccacgaagaagatcataatcacgccgtgcgcggtaaagatctgatcgtagtggtgaggtggcaggaagcccgcttcgcccgccgaggcaagagcctgctggctacgcatcataatggcgtcagcaaaaccacgcagcaacatcacaatcgccacgatgatatacatgataccgaggcgtttatggtcgacggaggtcagccactctttccacaggtaggtccacttaccgaagtaagtgatcaggccaacgagcgccagacctcccaaaataatgccagcgatcgtaaccatgacgataggttcatggaacgggactgcatcaagtgataattttccgaacatctttattcttcctcaacccctttaatgggcggattccgcgtggctcatgtccatgccttccataccttcgtgtgcgctgtgctcaccttctggctgggtcatgtccatgctcttaccgtgagccataaacttgttaattacatcggcaaacaagtctggtttcacgttggagaaatattccacctggttgtattcgctaggcgcggccagtttttcgaacgcagccatgtcagacatggtgttcggcgactgcttcgcttttgcgacccactggtcgaatgcggcgcgatccggtgttgcaatagctttgaacttcatgcctgagaagcccgggccgctgtagctggcggagataccgtcataagtgccgggttcgttggcgatcagatgcaggcgagtctgcataccggccatggcataaatctggctacccagacgcggaatgaagaaggagttcatcacggagttggaggtcactttgaagtacaccggagtgttcgccgggaaagcgatttcattcacggtagcaatgccctgttccgggtagatgaagaaccatttccagtccatggaaaccacttcgatggtaatgggcttctcgtcgtgtgccagcggcttgctaggctcaagagcgtgagtggttttccaggtcagtactgcaaggaagatgatgattaagataggtaccgtccagaccacagcttccactttattggagtgtgaccagttcgggctgtacttagcatctttattgctcgcacggtacttccaggcgaaaccaacagccatcaagattgcgggaataacgacaatcaacatcaggccaaatgccgtcagtatcagtgaacgttgctccagaccaatctgtcctttgggatctaacagcgcagaattacagccactgagcaatacagtgcctgcaaataatgacaaccatcccaaacttttattgtatttcctgagtctcatttaacgacctcaattccacgggatctggtggcgtttaaagtgtgtgggcattttacgggaaggttacattactgtaaacatgattaaattcctgttacttggatttggctgccaggtcacatatgttgcaaaacatatcaggttgattttaagaagctgttgcaaaagggcgttataacaaaaggggagtgctgaaggagtctgggcgggcaattggtataaccaatgtgaaataaaacaattatttaacaaataattatcattagagtgacaactgggtgatgagaaaataaagactcattagctgaatcgtgtaagaaaaatagaatttataaatggcgccaataatttccaaacgctaagccgcacaaaagaacaaatattaataagcgatactgatgtttatttagccgtaataattacggcgagtgattactacagctaaataatatttacagattacgtcagatgcgtttttcgtagcgccagataatccagcaaaccaccaagcacgacgccagaaagggcgactaaaaccccgacttccagcagagcaggcaggaaagagaagtgcgtcaaatccagcgcgtccatcgtcaatagcagtaaccacacggccaacaggctgacgcccgccgccagtgtccacatggcaaaggcataacctgccggatatgcggtacgggagataaagttgtcatttactcgtgtatattcaagcgtctggcggcaaaccagcagcaaaataagccctggtacggcagcggcgacggagaatagatagaatgtcgaccagccgtgtgcttcaacaaaccaacccgccacggggccgacataaactcgccctacagcagaaagcgctgagagcagggcaaattgagtagcggaaaatgacttattacatagcgtcattaacagcgcgacaaaggctgatgtgcccatcccgccacagaggttttcgaaaaagacggctgcgcccatgctgtagagatgcttatcagtaatcgacagcagccagtaaccggcgttagacgcaccttgtaaaatgccgaaaatcagcagtgcccggaacagtgacaggcgctgcatcaaaatcccaccgtacaatgcgccaacaatggtcgctagtaagccaagcgttttgttaaccacgcctacttcacccgcatcaaacccgacgccgcgaatcaaaaacgtggttgtcaggctcatggcgaatgcgtcgcccagcttatacagcacgataagaagcaaaataagccaggcattattgcgaccaaagaaatctcgcagaggtgcaacaaccgcttgttccagcgtttttggcacaggaatggtgtcggtcggttctggtgcaagcaacgtcgcgataatacagggaatcaacagcgccgccatcaaccagtacatgccctgccagcccagccatttatctgccagccacagggctaggccgccggaaaccagcatccctaaacggtaacccagaacgctgattgccgcgcccgcaccacgttcttctgccgggagcacatcggttttccacgcatcgaagacaatatcctgggaggcagagcaaaaagcgatcaccaccgccagcgccgccatccagcggagttgggtgcctggttcgagaaaacccatcgccgcaatggcgactaataacaggatttgcgtggcgagcagccaaccgcgtcgccgcccaaaaaatggaggcgtgtagcggtccatcagcggtgaccagaggaatttaaaaacgtaagcctggcctaccagagagaagaaaccaatggttttgagatcaatattctcgaccgtcatccaggcctgtaaggtaccggatgtcagggcgagcggtagcccggaagcaaaacccaggatcagcaatatggctgaacgcggctgttgaaaaatacgtaaatattgactggacatgggcgtctacaggcccggcttgcaccgggccagagggcagaaattaacgcgcgttctgcttgatgaattcgtggatgctggtgtcctgagacatatcagcgatggtatcggtcagcacactgttaaccgcatcggcgatatttttgttggaggcctggaacgcaccttcaacgttgtagctggcacgatagtttttggtcattttgttgccattctgcgcggtagcgatgatggcgatatccgctttggtcgcgatgttgtagcgcacgttgccctgggacacgtcagcatacagttggctaacgatgatttgcagattaaccgggccattcggaccaaccatgtaaccacgcgcggtcatctgtttttccagcacttcttgcagcaggaaacgcagatcgcgggaggcggtcagggtaacgatttgattatcgcgggtgacttttgccagcgcctgatcggtacgctgatcggcaccattaatgcttacggtgacgcccatcaggcttggatcctgctgtggcagtgtaatcgtcggggaaacttcaatagttgttggcggttttgcgcatcctgcaagcataaacagagcaactaacgggaagaggatttttttgaacatgttcgggctctcagagactcttaagcgtgtttggtaaaaattcccgccatcataacattgccaacggcgaggggaagtgggtaaggcatgtaaattcatcatgttgacgaaataatcgcccctggtaaaagaaacactgatgcgaggcctgtgtttcaatctttaaatcagtaaacttcatacgcttgacggaaaaaccaggacgaaacctaaatatttgttgttaagctgcaatggaaacggtaaaagcggctagtatttaaagggatggatgacatctcagcgttgtcggaggagatatttcatgatgatacgtgagcggatagaagaaaaattaagggcggcgttccaacccgtattcctcgaagtagtggatgaaagctatcgtcacaatgtcccagccggctctgaaagccattttaaagttgtgctggtcagcgatcgttttacgggtgaacgttttctgaatcgtcatcgaatgatttacagtactttagcggaggaactctctactaccgttcatgcgctggctctgcatacttacactattaaggagtgggaagggttgcaggacaccgtctttgcctctcctccctgtcgtggagcaggaagcatcgcgtaaaaacgcatttgcaactgtcggcgcttttccagtatgttgctaaagattttatgaaaaacggcctgcgggccgttttgttttgtctggattttgcgctttttgcccagcattcagacgaaaattgcccgggaattgtgaaaaaatacgcgacagcgcgcaataaccgttctcgactcataaaagtgatgccgctataatgccgcgtcctatttgaatgctttcgggatgattctggtaacagggaatgtgattgattataagaacatcccggttccgcgaagccaacaacctgtgcttgcggggtaagagttgaccgagcactgtgattttttgaggtaacaagatgcaagtttcagttgaaaccactcaaggccttggccgccgtgtaacgattactatcgctgctgacagcatcgagaccgctgttaaaagcgagctggtcaacgttgcgaaaaaagtacgtattgacggcttccgcaaaggcaaagtgccaatgaatatcgttgctcagcgttatggcgcgtctgtacgccaggacgttctgggtgacctgatgagccgtaacttcattgacgccatcattaaagaaaaaatcaatccggctggcgcaccgacttatgttccgggcgaatacaagctgggtgaagacttcacttactctgtagagtttgaagtttatccggaagttgaactgcagggtctggaagcgatcgaagttgaaaaaccgatcgttgaagtgaccgacgctgacgttgacggcatgctggatactctgcgtaaacagcaggcgacctggaaagaaaaagacggcgctgttgaagcagaagaccgcgtaaccatcgacttcaccggttctgtagacggcgaagagttcgaaggcggtaaagcgtctgatttcgtactggcgatgggccagggtcgtatgatcccgggctttgaagacggtatcaaaggccacaaagctggcgaagagttcaccatcgacgtgaccttcccggaagaataccacgcagaaaacctgaaaggtaaagcagcgaaattcgctatcaacctgaagaaagttgaagagcgtgaactgccggaactgactgcagaattcatcaaacgtttcggcgttgaagatggttccgtagaaggtctgcgcgctgaagtgcgtaaaaacatggagcgcgagctgaagagcgccatccgtaaccgcgttaagtctcaggcgatcgaaggtctggtaaaagctaacgacatcgacgtaccggctgcgctgatcgacagcgaaatcgacgttctgcgtcgccaggctgcacagcgtttcggtggcaacgaaaaacaagctctggaactgccgcgcgaactgttcgaagaacaggctaaacgccgcgtagttgttggcctgctgctgggcgaagttatccgcaccaacgagctgaaagctgacgaagagcgcgtgaaaggcctgatcgaagagatggcttctgcgtacgaagatccgaaagaagttatcgagttctacagcaaaaacaaagaactgatggacaacatgcgcaatgttgctctggaagaacaggctgttgaagctgtactggcgaaagcgaaagtgactgaaaaagaaaccactttcaacgagctgatgaaccagcaggcgtaatttacgcagcataacgcgctaaattcgcacaaaggcccgtcaccgccaggtggtgggcttttttttgtcatgaattttgcatggaaccgtgcgaaaagcctctttcggtgttagcgtaacaacaaaagattgttatgcttgaaatatggtgatgccgtacccataacacagggactagctgataatccgtccataaggttacaatcggtacagcaggttttttcaattttatccaggagacggaaatgtcatacagcggcgaacgagataactttgcaccccatatggcgctggtgccgatggtcattgaacagacctcacgcggtgagcgctcttttgatatctattctcgtctacttaaggaacgcgtcatttttctgactggccaggttgaagaccacatggctaacctgattgtggcgcagatgctgttcctggaagcggaaaacccagaaaaagatatctatctgtacattaactccccaggcggggtgatcactgccgggatgtctatctatgacaccatgcagtttatcaagcctgatgtcagcaccatctgtatgggccaggcggcctcgatgggcgctttcttgctgaccgcaggggcaaaaggtaaacgtttttgcctgccgaattcgcgcgtgatgattcaccaaccgttgggcggctaccagggccaggcgaccgatatcgaaattcatgcccgtgaaattctgaaagttaaagggcgcatgaatgaacttatggcgcttcatacgggtcaatcattagaacagattgaacgtgataccgagcgcgatcgcttcctttccgcccctgaagcggtggaatacggtctggtcgattcgattctgacccatcgtaattgatgccagaggcgcaactgtgccgctatacttatccagggcggcacaacgctgtaagcggcttgcgcctgagaatggcatttgcgtcgtcgtgtgcggcacaaagaacaaagaagaggttttgacccatgacagataaacgcaaagatggctcaggcaaattgctgtattgctctttttgcggcaaaagccagcatgaagtgcgcaagctgattgccggtccatccgtgtatatctgcgacgaatgtgttgatttatgtaacgacatcattcgcgaagagattaaagaagttgcaccgcatcgtgaacgcagtgcgctaccgacgccgcatgaaattcgcaaccacctggacgattacgttatcggccaggaacaggcgaaaaaagtgctggcggtcgcggtatacaaccattacaaacgtctgcgcaacggcgataccagcaatggtgtcgagttgggcaaaagtaacattctgctgatcggtccgaccggttccggtaaaacgctgctggctgaaacgctggcgcgcctgctggacgtcccgttcaccatggccgacgcaaccacgctgaccgaagccggttatgtgggcgaagacgttgaaaacatcattcagaagctgttgcaaaagtgcgattacgacgtacagaaagcacagcgtggtattgtctacatcgatgaaatcgacaagatttctcgtaagtcagacaacccgtccattacccgagacgtttccggtgaaggcgtacagcaggcactgttgaaactgatcgaaggtacggtagctgctgttccaccgcaaggtgggcgtaaacatccgcagcaggaattcttgcaggttgatacctctaagatcctgtttatttgtggcggtgcgtttgccggtctggataaagtgatttcccaccgtgtagaaaccggctccggcattggttttggcgcgacggtaaaagcgaagtccgacaaagcaagcgaaggcgagctgctggcgcaggttgaaccggaagatctgatcaagtttggtcttatccctgagtttattggtcgtctgccggttgtcgcaacgttgaatgaactgagcgaagaagctctgattcagatcctcaaagagccgaaaaacgccctgaccaagcagtatcaggcgctgtttaatctggaaggcgtggatctggaattccgtgacgaggcgctggatgctatcgctaagaaagcgatggcgcgtaaaaccggtgcccgtggcctgcgttccatcgtagaagccgcactgctcgataccatgtacgatctgccgtccatggaagacgtcgaaaaagtggttatcgacgagtcggtaattgatggtcaaagcaaaccgttgctgatttatggcaagccggaagcgcaacaggcatctggtgaataattaaccattcccatacaattagttaaccaaaaaggggggattttatctcccctttaatttttcctctattctcggcgttgaatgtgggggaaacatccccatatactgacgtacatgttaatagatggcgtgaagcacagtcgtgtcatctgattacctggcggaaattaaactaagagagagctctatgaatcctgagcgttctgaacgcattgaaatccccgtattgccgctgcgcgatgtggtggtttatccgcacatggtcatccccttatttgtcgggcgggaaaaatctatccgttgtctggaagcggcgatggaccatgataaaaaaattatgctggtcgcgcagaaagaagcttcaacggatgagccgggtgtaaacgatcttttcaccgtcgggaccgtggcctctatattgcagatgctgaaactgcctgacggcaccgtcaaagtgctggtcgaggggttacagcgcgcgcgtatttctgcgctctctgacaatggcgaacacttttctgcgaaggcggagtatctggagtcgccgaccattgatgagcgggaacaggaagtgctggtgcgtactgcaatcagccagttcgaaggctacatcaagctgaacaaaaaaatcccaccagaagtgctgacgtcgttgaatagcatcgacgatccggcgcgtctggcggataccattgctgcacatatgccgctgaaactggctgacaaacagtccgttctggagatgtccgacgttaacgaacgtctggaatatctgatggcaatgatggaatcggaaatcgatctgctgcaggttgagaaacgcattcgcaaccgcgttaaaaagcagatggagaaatcccagcgtgagtactatctgaacgagcaaatgaaagctattcagaaagaactcggtgaaatggacgacgcgccggacgaaaacgaagccctgaagcgcaaaatcgacgcggcgaagatgccgaaagaggcaaaagagaaagcggaagcagagttgcagaagctgaaaatgatgtctccgatgtcggcagaagcgaccgtagtgcgtggttatatcgactggatggtacaggtgccgtggaatgcgcgtagcaaggtcaaaaaagacctgcgtcaggcgcaggaaatccttgataccgaccattatggtctggagcgcgtgaaagatcgaatccttgagtaccttgcggttcaaagccgtgtcaacaaaatcaagggaccgatcctctgcctggtagggccgccgggggtaggtaaaacctctcttggtcagtctattgccaaagccaccgggcgtaaatatgtccgtatggcgctgggcggcgtgcgtgatgaagcggaaatccgtggtcaccgccgtacttacatcggttctatgccgggtaaactgatccagaaaatggcgaaagtgggcgtgaaaaatccgctgttcctgctcgatgagatcgacaaaatgtcttctgacatgcgtggcgatccggcctccgcactgcttgaagtgctggatccagagcagaacgtagcgttcagcgaccactacctggaagtggattacgatctcagcgacgtgatgtttgtcgcgacgtcgaactccatgaacattccggcaccgctgctggatcgtatggaagtgattcgcctctccggttataccgaagatgaaaaactgaacatcgccaaacgtcacctgctgccgaagcagattgaacgtaatgcactgaaaaaaggtgagctgaccgtcgacgatagcgccattatcggcattattcgttactacacccgtgaggcgggcgtgcgtggtctggagcgtgaaatctccaaactgtgtcgcaaagcggttaagcagttactgctcgataagtcattaaaacatatcgaaattaacggcgataacctgcatgactatctcggtgttcagcgtttcgactatggtcgcgcggataacgaaaaccgtgtcggtcaggtaaccggtctggcgtggacggaagtgggcggtgacttgctgaccattgaaaccgcatgtgttccgggtaaaggcaaactgacctataccggttcgctcggcgaagtgatgcaggagtccattcaggcggcgttaacggtggttcgtgcgcgtgcggaaaaactggggatcaaccctgatttttacgaaaaacgcgacatccacgtccacgtaccggaaggtgcgacgccgaaagatggtccgagtgccggtattgctatgtgcaccgcgctggtttcttgcctgaccggtaacccggttcgtgccgatgtggcaatgaccggtgagatcactctgcgtggtcaggtactgccgatcggtggtttgaaagaaaaactcctggcagcgcatcgcggcgggattaaaacagtgttaattccgttcgaaaataaacgcgatctggaagagattcctgacaacgtaattgccgatctggacattcatcctgtgaagcgcattgaggaagttctgactctggcgctgcaaaatgaaccgtctggcatgcaggttgtgactgcaaaatagtgacctcgcgcaaaatgcactaataaaaacagggctggcaggctaattcgggcttgccagcctttttttgtctcgctaagttagatggcggatcgggcttgcccttattaaggggtgttgtaaggggatggctggcctgatataactgctgcgcgttcgtaccttgaaggactcaagtgcgatataaattataaagaggaagagaagagtgaataaatctcaattgatcgacaagattgctgcaggggctgatatctctaaagctgcggctggccgtgcgttagatgctattattgcttccgtaactgaatctctgaaagaaggggatgatgtagcactggtaggttttggtacttttgccgttaaagagcgtgctgcccgtactggccgcaacccgcagaccggtaaagagatcaccatcgctgctgctaaagtaccgagcttccgtgcaggtaaagcactgaaagacgcggtaaactaagcgttgtccccagtggggatgtgacgaagttcaaggggcgcatctactgatgtgccttttttatttgtattcggtgactttctgtgtcttgtgggctgacaattgcccccgtttcttgtcacaataggcctttgcgcgcatcgatacgttgcgtgaggtacacagtcatctacagcggagtgttgttacaccatgatggacagcttacgcacggctgcaaacagtctcgtgctcaagattattttcggtatcattatcgtgtcgttcatattgaccggcgtgagtggttacctgattggcggaggcaataactacgccgcaaaagtgaatgaccaggaaatcagccgtgggcaattcgagaatgccttcaacagcgagcgtaatcgcatgcagcaacagctgggcgatcaatactccgagctggcagcgaacgaaggctatatgaaaaccctgcgtcaacaggtgctgaatcgtctgatcgacgaggcgctgctggatcagtacgcacgtgagctgaaactgggtatcagcgatgagcaggttaaacaggcgattttcgcgaccccagccttccaggttgacggcaaatttgataacagccgctataacggtatcctcaaccagatggggatgaccgccgatcagtacgcccaggcgctgcgtaaccagctcactacccaacagctgattaacggcgttgccggtaccgattttatgctgaaaggtgaaaccgacgagctggcggcactggtcgcgcaacaacgcgtggtgcgtgaggcgactatcgatgttaacgcgctggcggcgaagcagcctgtgaccgaacaggagattgccagctactacgaacaaaacaaaaacaatttcatgacgccggaacaattccgcgtgagttacatcaagctggatgccgcaacgatgcagcaaccggttagcgatgcggatatccagagctactacgaccagcatcaggatcaattcacccagccgcagcgtacccgctacagcatcatccagaccaaaactgaagatgaagcgaaagcggtacttgatgagctgaataaaggcggtgattttgctgcattagccaaagaaaaatctgccgatattatctctgctcgtaacggcggcgatatgggttggttagaagatgccactatcccggacgaactgaaaaatgctggtctgaaagaaaaaggccaactgtctggtgttatcaaatcttcggtcggtttcctgattgtacgtctggacgacattcagccagcgaaagtgaaatcgttagacgaagtacgtgacgacattgcggcgaaagtgaaacacgaaaaagccctcgatgcgtactacgcgctgcagcagaaagtgagcgatgcggcaagcaacgacaccgagtctctggccggtgcagagcaagctgccggcgttaaagccactcagacgggttggttcagcaaagataacctgccggaagagttgaacttcaagccggttgccgacgctatctttaacggcggtctggtaggtgaaaacggcgcgccgggcatcaactctgacatcatcaccgtagacggcgaccgcgcattcgtgctgcgcatcagcgagcacaaaccggaagcggtgaaaccgttggcagatgttcaggaacaagttaaggcactggttcagcacaacaaagctgaacaacaggcgaaagtggatgctgagaaactgctggttgatttgaaagccggcaaaggtgcggaagctatgcaggctgccggtctgaaatttggagagccgaaaaccttaagccgttccggtcgtgacccgattagccaggcggcgtttgcactgccactgccagcgaaagacaaaccgagctacggtatggcgaccgatatgcaaggcaatgtggttctgctggcgctggatgaagtgaaacaaggttcaatgccggaagaacagaaaaaagcgatggtgcagggtatcacccagaacaacgcacaaatcgtctttgaagctctgatgagtaacctgcgtaaagaggcgaaaatcaaaattggcgatgcgctggaacagcaataatcctgaagccgcctcgcaaaaaaatgcgttgcagctgtaacaagaaaaggtcgctttcgcggccttttccatttctgaacattgccatttgtttactgttttcactgccgttaaggtgattccactgttaacaaacaaggagaaaacagtatgaaacacggaattaaagcactgctcattaccctgtccctggcctgtgccggaatgtctcatagcgcgctggcggcagcttctgtggcgaaaccgacggcggtagaaaccaaagcggaagctcctgcagcacaaagtaaagcagcagtaccggcgaaagccagtgacgaagaaggcacccgggtcagcattaataatgccagcgcggaagagctagcccgcgcgatgaatggcgttggcctgaagaaagcgcaggcgattgtcagttatcgcgaagagtacggtccgtttaaaactgtggaggatctaaagcaggtgccggggatgggcaattcgctggtggaatgtaatctggcggtattaaccctgtaattaatttgcatagtggcaattttttgccagactgaagaggtcataccagttatgacctctgtacttataacaacaacgtaaggttattgcgctatgcaaacacaaatcaaagttcgtggatatcatctcgacgtttaccagcacgtcaacaacgcccgctaccttgaatttctcgaagaagcccgcttggatgggttggaaaatagcgacagttttcagtggatgacggcccataacatcgccttcgtcgtggtcaatatcaatattaactatcgtcgcccagcggtattaagtgacctgttaactattaccagtcagttgcagcaattaaacggtaaaagcggcatcttaagccaggtcattacactggagccggaagggcaggtggtagcggatgcgcttattacgtttgtttgtattgatcttaaaacgcagaaagcattagctctggaaggggaattgcgcgaaaagctggagcagatggttaagtaaacgttttgtggtgccggatgctcaagccgcatccggcgacacccggaataattacctcaacccggttttctgcttcatcgctgccatcaccgtcggtttatcggccagataatgattcaaaccgttggcgcgtaaattacatgccgcacaatgaccgcaaccgtcgcctttaatgccgttatagcaggtcaacgtttcgttacggactaaatccagtttgccgtaataatctgccagcgcccaggtttccgctttatcaatccacatcagcggcgtttcaaaacgaatatctttcgccatgcccaaactgacggcatggtttagtgctttcacaaactcatcgcggcaatccgggtagccggagaaatccgtttcacagacgccggtaattacggcttctgcttttacctgatacgcatatattgccgccagcgtcaggaacaaaatattacgccctgggacaaacgtattcgggatgccatcggcttcaggttcataatcaggcaccggaatgctgtcacgtgtcaggctgctgaccgccagctcgttgagcagcgttacatcaagaaccttatgcgcgcgtgctcccagtttcagcgccagttcgcgtgccacgtcgatttctgcgcgatgtcgctgaccgtaatcgaacgtcacgcaatggacttcatcatattgttgtaatgcctgcaccagacaggtggtggaatcctggcctccactgaacacaacgacagcacgtttcatagataatcctgcttgaacaataaaagcgttatggtaacgcctgcgattaacccggaccagctattcattgcgacggcgcgggaagccaggcttcggtaaattcaaaccagccgcgcggtgtcagtcgcacaccgttcacgccgggaggggcactaatgcgatagtgatagttgaacagcggcgtcagcgtcgcgtctgccattaactggctaaaaaccgctttcagggcattaaatcggttttcctcatcaggcattacttgcaccgcgtccagcgtcgattgcagatgtgcatatgctggagcgtcgaaaacatgtggccatagtggatcgcaacgtagccattgctccagagtatattccggtgcttcgccaattaatctgtcgcccatcatgaggtctgcgtgtgccagtagggtcgtgtcgtcccagttttttgcgttatgaaaaataattgtgagttcacagccttccgctgccagtgtcgcctgtaggcgttctgccatggtatgaagttctatcggtaagtgataaaccagcgtcaaggttttcggtagtttgacttcatccggtacttgccagtgcggaatagtccagcctggcagtaatgcatgactggcggtgatcaggttttctccgacttctaacgtttgtaataaaccggattgatgaataatggagatcacttttcgcgcctgccagagggagagtcggggacttttgcgcaacgttaaatagcaaaaacctaaactgatgccactactgacctggctgacccgttgcagctcctccggtttgccgatggtgatttgcacgggatgccgacaactggttcccaaatctttttcgaaaagcggcggagttatccagtactcaaccgctttaagcagcggatgacgcaaatggtaataatcatggctctccaggcgcaccagctccgctgtgaattgtgttaagcgaaaaggaccagtgccgatcagtgggaattgcggatgcgccagatggctgcaatagctcgccagccggtgcgcaagccagtaatcggggcgatgtaaaaagaaggtcagacactgcggatgggtgacctcaatacgcttcacgctaataaataattgatccagtgctggcagttgtaacagcatcaataatcgctggtgtaagtgtgaggcttttactgcatcgccgttatgccagtgtagggttgaacgaagataaaagtcccagcgtaacccgtcagtagaggtttcccagtgatgcgctaaatcgccaatcgggcgctgagtattattatcgaagcgggtcaggccggaaagtatctgcccggcgagatgctgctcggcacggccgggcaaaaagcctggttgtagcggttcgagcgggcgatagtagggaatacgcaacgtgggtgtatcgttttgccattgtccgcccataaacggctgtaacagagtgcgcagctcacctggggccagttgcgccagctccagcacatcttgctgctttccggtttccagtgcctgttccatcatcgcattgcgtagcgattccggcgtgaccagaaagcgtaattgtccgcgctttccgcgtcctgactgcgcctgccactccagccatcccgcctcctgtgcctgacgcaacagcgtacgaacatggcgttcgctgcaaaaacagcgttcggccagttcgctgacggtgacggtttgcggctttccggcggaaggttgccacagacgttgatactagttaagacggttgagcaatcgcatataaacccggaacaatattatttaactattcactattacttccgtatatatcaggtgatactcaatcaccattaaccgtgtcacagagtggagaaagaaatggctcgtctggcagcatttgatatggatggcactttattgatgcctgaccatcatttaggtgagaaaaccctctctactttggcgcgactgcgtgaacgcgacattaccctcacttttgccacggggcgtcatgcgctggagatgcagcatattctcggggcgctatcgctggatgcgtatttgattaccggcaacggaacgcgcgtgcattctctggaaggtgaacttttacatcgtgatgatttacctgcggatgtcgcggagctggtgctgtatcagcaatgggatacccgagccagcatgcatatcttcaatgacgacggttggtttaccgggaaagagatccctgcgttgttgcaggcatttgtctatagcggttttcgttatcagataatcgatgtcaaaaaaatgccactcggcagcgtcaccaagatctgcttctgtggcgatcacgacgatcttacacgcttgcagatccagctatacgaagcattaggcgagcgtgcacatttgtgtttttccgccacggattgcctcgaagtgctgccggtgggctgcaataaaggcgctgcattgacggtgctgacccaacatttaggtttatcgttgcgcgattgcatggcctttggtgatgcgatgaacgatcgcgaaatgttaggcagcgtcggtagcggatttattatgggcaatgcgatgccgcaactgcgcgcggagctcccgcatttaccggtgattggacattgccgaaatcaggctgtctctcactatttgacgcactggctggactatccacatctaccttattcccccgaataacgagatcccttccagcaccgggcaattgcccggttttttttgcgttgaatttgtcattttgtgccgtggtgtttaaaccgcacagaataaattgtcgtgatttcacctttaaaataaaattaaaagagaaaaaaattctctgtggaagggctatgttagataaaattgaccgtaagctgctggccttactgcagcaggattgcaccctctctttgcaggcactggctgaagccgttaatctgacaaccaccccttgctggaagcgcctgaaacggctggaggacgacggtatccttatcggcaaagtcgccctgctggatccggaaaaaataggcctcggcctgaccgcttttgtgctgataaaaacgcaacatcacagcagcgaatggtattgccgctttgtcacggtggttaccgaaatgccagaagtgctggggttctggcgcatggctggtgaatacgattatctgatgcgcgtccaggttgccgacatgaaacgctacgacgagttttataagcgtctggtaaacagcgtgccggggctgtcggacgtcacttccagcttcgcgatggaacagattaaatacaccacttctttacccatcgaataaatatccagaatcaagtcaggacacaacgcgtgcgattatttgctcaattaagctggtatttccgtcgggaatggcgtcgctatctcggggctgtcgccttgcttgtcattatcgcgatgctgcaactggttccgccaaaagtggttggtattgttgtcgatggcgtgacagaacaacactttactaccgggcagatcctgatgtggatcgccaccatggtgctgattgccgttgtggtttatctcctgcgttacgtctggcgcgtattgctgtttggtgcgtcttatcaactggctgttgaactgcgtgaagattattaccgtcagctaagccggcagcatcctgagttttacctgcgtcatcgcacgggtgatctcatggctcgtgcgaccaatgacgtcgatcgcgtcgtgtttgccgccggagaaggggtgctgacgctggtggattcactggtgatgggctgcgctgtgttgattatgatgtctacgcaaattagctggcagttgaccttatttgccctgttgccgatgccagtgatggcgatcatgatcaagcgcaacggcgatgccttgcatgaacgctttaagctggcacaggcggcgttttctagtcttaatgaccgcacccaggaaagcctcaccagtatccgcatgatcaaagcctttggtctggaagatcgccagtcggcgttatttgccgcggatgccgaagataccggcaaaaaaaacatgcgggtggcgcgtattgatgctcgtttcgacccgaccatctatatcgcgattggtatggcgaacttgctggcgattggcggcggtagttggatggtggtgcagggcagtttaacgctgggccagctcaccagttttatgatgtatttaggtctgatgatttggccaatgctggcgctggcatggatgtttaacattgtggaacgtggtagtgctgcatacagccgtattcgcgcgatgctggcggaagcgccggtggtgaacgatggtagcgaacccgtgccggaagggcgtggcgaactggatgtaaatattcgccagtttacgtatccgcagactgaccatcctgcgctggaaaacgtcaatttcgctctgaaacccggtcagatgctgggtatttgcgggccgactggttccggcaaaagtaccctgttgtcgctcattcaacgtcatttcgacgtcagcgagggggatattcgctttcatgatattcctctgacgaagttacaactcgatagctggcgtagccgcctggcggtggtcagccagacgccattccttttttctgacaccgtggcaaataacatcgcgctgggttgcccgaatgccacccagcaagagattgagcatgtcgcgcggttagccagcgtacatgacgatattttgcgtttaccgcaaggttacgatacagaggtgggcgagcgcggcgtgatgctttccggcgggcaaaaacagcgtatctctattgctcgtgcgttattagtcaacgcggaaatcctcatccttgatgatgcgctttcggcggtggacggacgcacagagcaccagatcctgcataacctgcgtcagtggggacagggaagaacggtaatcatcagtgcccatcgcctttctgcactgacggaagccagtgaaattattgtgatgcagcacggacatatcgcccagcgtggcaatcatgatgtgctggcgcaacaaagcggctggtatcgcgatatgtatcgctatcaacaactggaggcggcgctcgacgacgctccggaaattcgcgaggaggccgtcgatgcgtagttttagccaactgtggccgactctcaagcgcctgttagcgtacggttcaccgtggcgtaaaccgttggggattgcggtcctgatgatgtgggttgcggcggcggcagaagtcagtgggccgctgcttatcagctattttatcgacaatatggtagcgaaaaataacctgccgttgaaagtggttgcagggctggctgcggcgtatgttgggctacaactgtttgccgccgggctacattacgcgcagtcgctgctgtttaatcgggcggcagtaggcgtagtgcaacagttgcgtaccgacgtgatggatgctgcgttacgccagccattaagcgagtttgatacccaacccgtcgggcaggtgatttcccgcgtcactaatgacactgaagtgatccgcgatctctacgttaccgtagtggcaactgtcctgcgtagcgccgcactggtgggcgcgatgctggtggcgatgttcagcctcgactggcgaatggcgctggtggcgataatgattttcccggtggtgctggtggtaatggtgatataccagcgttacagcacgccgattgtccgccgtgtgcgcgcctatctggcggatatcaacgacggctttaacgaaatcatcaatggcatgagcgttatccagcagttccgtcagcaggcgcgatttggcgaacgtatgggggaggccagtcgttcacactatatggcgaggatgcaaaccctgcgcctcgacggttttctgctgcgtccgctgctgagtctgttttcatcgctcattctttgtggcttgttgatgctgtttggcttctccgctagcggcaccattgaagtgggcgtgctgtatgcgtttatcagctatcttgggcgacttaacgaaccattaatcgaactgaccacgcaacaggcgatgctgcaacaggctgttgttgctggtgagcgcgtgtttgaactgatggacggaccgcgccagcaatatggcaatgatgatcgcccgttacagagtggcaccatcgaagtcgataacgtgtcatttgcttatcgcgatgacaatctggtgctaaagaacattaatctctctgtgccttcgcgtaactttgtggcactggtcgggcataccggcagtggcaaaagcaccctcgccagtttattgatgggctattacccgctaacggaaggtgagattcgccttgatggtcgtccattaagttcgctaagtcacagcgcgctgcgccagggcgtggcaatggtgcagcaagatccggtggtgctggcggataccttcctcgccaacgtgacgctggggcgtgatatctccgaagaacgcgtctggcaggcgctggaaaccgtgcaactggcggagctggcgcgcagcatgagtgatggtatttatacgccgctgggcgagcaggggaataatctctccgtcgggcaaaagcaactgctggcactggcacgcgtgttggtggagacgccgcaaatcctgatccttgatgaggcaaccgccagcattgactccggtactgaacaggcgattcaacatgctctggcggctgtgcgtgaacataccacgctggtggtgattgctcaccgcttatcgaccattgttgatgccgacaccattctggtgcttcatcgtgggcaagccgtggagcagggcactcaccagcaactgctggcggcccagggacgctactggcagatgtatcaactgcaacttgcgggcgaagagctggcagccagcgtgcgtgaagaagaatcattgagcgcctgaatagcgcaatatttcatcgttggtgcaaaaatgtaacgcactgtgcactgtcatagtgcgttttcattttcaatctttttaacttcctgctctctttctcgtttttcatttctggcacaccgtttgcaataccttcttcgtgtagcagaaccattaccgaattctgaccggaggggatctatgaagctggtgaccgtgataatcaaaccattcaagctggaagacgttcgtgaagcgttatcttccattggtattcagggcctgaccgtcaccgaagtgaaaggtttcgggcgtcagaaagggcatgccgagctgtaccggggggcggaatacagcgtcaacttcctgccaaaagtaaaaattgatgtggcgattgctgatgaccaactcgatgaagtgatcgatatcgtcagtaaggcggcttacaccggaaaaattggcgacggcaaaatcttcgtcgctgaattgcaacgcgtcattcgtattcgtaccggcgaagccgacgaagcggcgctgtaatctctggcacacagcaacaggaacgaaaaatgaagatagcgacgataaaaactgggcttgcttcactggcgatgctgccgggactggtaatggctgcacctgcggtggccgataaagccgacaatgcgtttatgatgatttgtactgcgctggtgctgtttatgactattccggggattgccctgttttacggtgggttgattcgcggcaaaaacgtgctgtcgatgctgacgcaggtgacggtgacatttgcactggtctgtattctctgggtggtttacggttactcgctggcgtttggtgagggcaacaacttcttcggcaacattaactggttgatgctgaaaaacatcgaactgacggcggtgatgggcagcatttatcagtatatccacgtagcgtttcagggatcgtttgcctgcattaccgtaggcttgatagttggggcgctggcggaacgaatccgcttctcagctgtgttgattttcgtggtggtatggctgacgctctcttacattccgattgcgcatatggtctggggcggtggtttgctggcttctcacggtgcactggatttcgcggggggcacagtggtgcacattaacgccgcaatcgccggtctggtgggcgcgtatctgataggaaaacgcgtgggcttcggtaaagaggcgtttaaaccgcacaacctgccgatggtcttcaccgggactgccattctctatatcggttggtttggctttaacgccgggtcagcgggcacggcgaatgaaatcgcggcactggcttttgtgaatactgtggtcgcaacggcggcggcaattcttggctggatcttcggtgaatgggcgctgcgtggtaagccttcactgctgggggcgtgttctggcgcgattgccggtctggtcggcgtgacgccagcctgcggctacattggggttggcggcgcgttgattatcggcgtggtagctggtctggcgggcttgtggggcgttaccatgctcaaacgcttgctgcgggtggatgatccctgcgatgtcttcggtgtgcacggcgtttgtggcattgtcggctgtatcatgaccgggatttttgccgccagctcgctgggcggcgtgggcttcgctgaaggtgtgacgatgggccatcagttgctggtacagctggaaagcattgccattacgatcgtctggtccggtgtggtggcatttattggctacaaactggcggatctgacggttggcctgcgtgtgcctgaagaacaggagcgagaagggctggacgtcaacagccacggcgagaatgcctataacgcgtaacaagcactgcaaaaaacagccggacggttttcacctccggctatttttttaattgtgattacgcattaccccttcctgaacggtcgaggcaaccagcacgccgtcctgggtataaaactcaccgcgcacaaagccgcgtgcgctggacgccgaggtgctctccacgctatacagcagccattcattcaaattaaacgggcgatggaaccacatggaatggtcgatggtggcaatctgaatccccggttcgagaaaaccgatgccgtgcggctgtagagctaccggcaggaagttaagatcagaagcgtaaccgagaagatactgatgaacgcgcagatcatccggcacgctaccatttgcgcggatccacacctgacgatgtggttctgcgacgtgacctttcagtgggttatgaaactccaccggacggacttccagcggacgatcgcagatgaatttatctttcagcactggcggcagcaggtgcgccagcgattgggcgatttgcgtttccgaaggcaggccatcaggcgctggcgcggacggcattgttttttgatgttcgaaacccgcttctggtgcctggaaagaggccgtcatataaaaaatcggtttgccgttttgaatagcagcaacccggcgggcgctgaagctgttaccgtcacgcagcgtttcgacatcataaataatcggcttcttactatcgccagggcgaagaaagtagctgtgaaacgaatgtaccagccgctcttcagggacggtctcttttgcagcatacaaggcctgacccacgacctggccgccaaacacctggcgtaaacctaaatcttcactctggccgcgaaagagtccttcctcaattttttccagatttaacaatgtcagtaaattttttagcgcctgactcatataactctccagtaacaaagctgccgcagcaagccaaagtgagttgagtataacgcaaatttgctactggtccgatgggtgcaatggtctgaattacgggctaattacaggcagaaatgcgtgatgtgtgccacacttgttgacgttactattttgttaaccattcttccggcgaggaaagttagcccgctggtgcattgataataaggagaaatgaatgaaactcgtgcacatggccagtggtttagcggttgcgattgcgttggcggcttgcgcagataaaagcgcggatattcagacgccagccccggctgcaaatacgtctatttcagcaacacaacaacctgctatccagcaaccgaatgtctccggtaccgtctggatccgtcagaaagtcgcactgccgcctgatgctgtgctgaccgtgacactttctgacgcgtcgttagccgatgcaccgtcaaaagtgctggcgcagaaagcggtgcgtactgaaggtaaacagtcaccattcagctttgttctgccatttaacccggcagatgttcagccgaacgcgcgtattctgttgagtgcggcgattaccgtgaatgacaaactggtatttatcaccgataccgttcagccggtgatcaaccagggcggaactaaagccgacctgacattggtgccggtacagcaaaccgccgtgccggttcaggccagcggtggcgcaacgactaccgtaccttcgacttcaccaactcaggtgaatccgtcttcggcagttccagctcctacgcaatattaagcgacgttaaccctctccgcccggagagggttagtagttccagcgataacgctgcaagtcgatttgcccgcttcccgataccatcacaccttctgccagtaatgcctgtcgctgacgctgtaaatccggtccggttagcgaaattgtgccgtggcgattaaccacccggtgccagggtaaggtgctgccttcagggagacgctttaacacaccgcccacctggcgcgcggcgcggggcgatcccgccagtttcgccacatcaccgtaagtggtgacatagccttcgggaatagcggcgacgatttgccagacgcgttggggaaatgaatcttctttttccatcttttcttcctgaggtaatttttcagcataatctggaaaaacgcccgagtgaagtcgcattgcgcaagaaaccagcatctggcacgcgatgggttgcaattagccggggcagcagtgataatgcgcctgcgcgttggttctcaacgctctcaatgggggctctgttggttctcccgcaacgctactctgtttaccaggtcaggtccggaaggaagcagccaaggcagatgacgcgtgtgccgggatgtagctggcagggcccccacccatttctgcctcccaccgtttcgtcaaaaaatcccaatatggctaaactttaaccacaactgacgtcgcaagaattgtctggctgcgcagtacgcttcggaggtatgtctgatgaagtatgttgatggttttgtggttgccgttcctgccgataaaaaggatgcctatcgggaaatggccgctaaggctgcgccattgtttaaagagtttggcgcgcttcgtattgtcgaatgctgggccagcgatgtaccggatggcaaagtgaccgattttcgtatggcggtgaaagcggaagagaatgaagaggttgtctttagctggattgaatacccttcaaaagaggtccgcgacgctgctaatcaaaagatgatgtcggacccacggatgaaagagttcggcgagtccatgccgtttgacggcaagcgaatgatctatggcggattcgagtcaatcatcgacgaataggtagcgtgacgggctgtgcggcgtgccgtcagcccaaaaattcacaaatgttgctcggcccagcgtaagaaatcttctttcggtaatgccttgctgtagagccagccctgaccgtagtgcacgccatgctggcgtaaccactcttcttgtttactggtttcgattccctccgctaccattttcagtttcagtgtttttgccatttcgatgatatgcggcgtgacatttttatattccagcgcatcaacgaaagatttatcgatcttcagaatgtcgacatccagatcctgtaaataacttaaacttgaataccccgtaccaaaatcatcaagataaatttcatggcccgcctcccggtagcgagaaattatcggggcgctggttttcggatcggcaaactcgcgttcagtgagttcaagcgcgatctgtctgggattaacctgatagtgattgatcatgtcacgcagcaattgcgggattttttccgaggtgagcacgggggattcaagattgatcgaaatatgctgctgtggatgctgacgcagccagtcgcccatatcttcaaagacgcttcttataatcagtagcgtcaatggctcagaaaggcccgtttgctgtgccagcggaataaaactatctggtgacaaccaactaccgtctgtctgcggccagcgcgccagtgcctcagcaccgacaattttgccattggctaaggagacaatcggctgatagtgcacgcaaatatcacgattttcgatagcatcctgcagccgatgatgcggtgactgaatacggcgcaaaatacgcagcacaaacatcgctgccagcaggccaatcaccaacccgagcggtaaccaaataaagacttgccgatgccagcctttctgcaacattttcgttgaagcccatgtgatgatcgaaatattcatctccggtaagggcaggatatcgtaaatgattccattattttcgatatgctcaccgggtgttttttgtagcctggtaataattccctgagcaatttcatcgctgctggttatgacaacgttatgggcattgccaataatggcggcatcaatttgccatgagctatagggaatgacatcaataaaggaagcggggtcgatcatgacgacataatgtgccgttcccatggcgaccatgtaacggataatgcctaaatcgttatgcgatgttaaccagacacgataaccatctttcgaaattttacctggctcggggaaggtatcgggcggactttcatgctccagagacgaacactggggaacgttgttatcgatataagccacttcctgaatatagcgataactgtaagatacccgacgcatttccatgagatgggcttcgctacaggcagcgccttgccatctttccagctcctgcagcgcatctttcccttgtgtcgccaccttattggctcgaatagcgacgcgggaggaataggtatccagctcttcaataaacgatgtttctacctgctgatgggccagccagatgcttaagccgacaggcagcaatactgaaagaatcagtactcccgaaataaggccgaccagatgtcgtgttctcaccagcatatccttattaacacagtgtagggaaagtatatctgattgtggaaaaaggctggctggagataaggaggtagagctggtatttcatgaagtgatgggtggaaacgatcattgtcatttgaccaggcgcagagctttacgcctggtatgtaaccctaacttaagatgttgattcggcgcgagcgagggtaaaaatatcgtaaaaagacagttcacctttacggacgatcattttttgcagttgttccttatgaacatccgcgacacgcggagagttcaagatggcttcaaccagcgcggcaggtacaaagcgcgtgttgtaccattcgccgttatagcaaacgcggaaatccagcacgtcgatatcttcatagcggtagcgtgggtagacatcgaaaaagaagaaaccattaagcaggataaataatacaaccagtagccagacagagcctgacagcgtttcggactgcaacatcaccgccagggtggcaaaaaaagcaacgtacataccgataaacagccccggatgtttacggataaaactgatactaaagcggggtttgttgtcgcgtttttcgcgggtattcagagactcaatcgtttcggtcagcaggcgttgtatttcggtcatcgtttgccttcgtggtatctgcaactttccagggaacaccctattttaacgtgggaatagtagaggggaagtaacagatctaccacaattttgcataacagttgcgaaaaaccgattacaattttttaattattctggctggattaccgcccacgacaacgttgtccgggacatcttttgtgacaactgcacctgaggctaccacgacgttatcaccaatggtcacaccagggttaatgaccgcgcgtccgccaatccagacgttattaccgatggtgacgggtttccccagttcagcaccgctattacgtgctacagggtcgatgggatgtgttgccgtgtagatatgaacgcctggtgccaacatacagttatcaccgatgcgaatagggcagacatcaagcatcacgcaatcgaagttggcgaaaaaattattaccgagaaaaatgttatagccatagtcacagcgaaacgttggctcaatataagcctctgtcacctgaccgaataaatcagcgagaatttgctggcgtaatgtgtgctcttccgccagggaatgattgtatcggtgaataagctgacgagcgcgcaggcgatcgcgagataacgtctcatctgccgagcgatacaactcaccagcaatcatcttttctttttctgtgctcattactgacctccggttgctgaaaatgcggcaacacagtaagacgaaaagtcagtgaagagaacgttcccattacatctgtgtgataaagatcacatagggtatgtcttcatggcgaaaaagtataaaattcttaataaacagccggttatagctccgaaagcgaattatttattagcgaataaatttccatactgaggaagggatcttgtcgtacagtttattcatggtcaattcggcgaggcggtgatctgcggctgagtaaaataccgccagttcattatctgataattcgtatttatttttctcgataacacgctccagcgtgtcaattgtctggcaacgacgtaaacgcattaaataatcggttttcgttaaaggtttttcggacatacttctacccatggttgtaataattctaacaagataaactcgcaggattctctttcgtcgcattgacaaaacaacggaatagtcgattacctgacttccgccatttctgaagatcctgcatattaataccataactactgaacaacataaaggtgtcatccagatattcgtcgatctgctcaatgagcttattgtcttcattatacttaattttgtaattaagtgcgaaggtcgcaatatgctcaatcagttcattcaactggaggttgatcgccgaggttgggtcgttaacccagccatgattgctttcttcaaggtttgcaagacagtcatgatacagggtttcacagagaaacttaagctgtgcgatatcatgtcttttgggtgagtattcatccataacgcgtccccttcttagcggttgaactaacggacacctttcgggatggaaaaaacttactgacctggacttgccctctcgtttgttagcttaactataagccactctttgcaggttttcatcgcattattacgaaaaattacaattaggaaggaagcgggacagggctcactttttcatactagcaccaacccgcagcaggtaaaagcagtttgctcgaactgttcataacatttcaggattatcgccagatgaaattggtgacactaataccaggattgctctgaatatgacgtaataaccgaggaatgaataaagaattaccgcaaataattaagaatagcctctaaatgattatggattattaaatctattagcgctacttaatataaattaactaacaatcagtattttttatgaattttatacgtggttaatactggttttcgtatgagatcctgagttggtggttcaattactccttaatgttcgtaggttatgcataaaaaaggccgcttacgcggccttagtgattacacgttgtatcaatgatgatcgacagtatggctgtgctcgatatcttcattcttgcggctaaagcggcggcgaaccaccacaaagaataccggaacgaagaagattgccagtaccgttgcggtcaccatcccgcccattacaccggtacctactgcgttctgcgcgccggaaccagcaccagtactgataaccagcggcataacgccgaggataaacgccagcgaggtcatcaggatcggacgtaaacgcatccgcaccgcatcaagcgtcgcttcaatcagacctttaccttctttatccatcaagtctttggcgaattcgacgataagtatcgcgttcttcgccgacaacccaatggttgtgagcaggcctacctggaagtaaacgtcattggtcaggccacggaaggtggcagccagcaacgcaccgataacccccagcggaacgaccagcataacggagaacggaatcgaccagctctcgtacagcgccgccagacacaggaacacgacaatcaacgaaatcgcgtacagtgaaggtgcctggttgccggagagacgttcctgataggacatccccgtccagtcatagccaacaccggtaggcagtttgctcgccagttgttccatcagctccattgcttcaccggtacttttacccggtgccgcctggcctaagatttccatggatggcaggccattgtaacgttccagacgcggcgaaccgtactcccaacgcgaagaggagaacgccgagaatggcaccatctgaccatcagcagcacgaacataccagtcgccgatatcatccggcagcatacggtatttcgcttctgacatgacgtaaactttcttcacacgaccgcggtcgataaagtcgttcacatagctgccgccccatgcagcgcccagagtggtgttaatgtcgttgatagaaacacccagcgcctgcgctttttcctggtcgatatcaatcttaaactgcggggtatcttccagaccgtttggacgtacgctggtcaacatatcagggtgcttcgctgcttctgcaagcagctggttacgcgcctgagtcagtttttcgtgaccaaggccagcctggtcaatcagctcaaagtcaaagccggttgcagtacccagttccacgattgcgggcaggttaaaggcgaaaaccatcgcatctttgatttgcgagaaagcgcgtgttgcacgcatggtaatcgcttcaactttgttttcttcgcccggacgatcggcccagtccttcaaggaaacgaacgcaataccggtattctgaccacgtcccgcaaagccgaagccgttaacggcgaacaccgactcaacgttgttcttttctttggtcagatagtaatgcgttacctcattgagcactttctgtgtacgttcctgcgttgcacctgctggcagctgaaccatggtcataaacacgccctggtcctcatctggcaagaaggagcttggcagacgcacgaacagataggccatgccgaccacgatgatcagatacagcaccaggtaacgccccgtactgcgcagaataccgcctacgctgtcggtgtagtggtgcgtgctcttctcgaacatgcggttaaaccagccgaagaagccttttttaccttccccgtgatcgcctttggcaatcggtttcagcatggtggcacaaagagctggagtcaggatcaacgccaccagtaccgacagcgccattgctgaaacaatggtaatagagaactgacgatagatagcaccagtagaaccgccaaagaaggccatcggtacgaataccgccgacagtaccatcgcgataccgaccagagcgccctgaatctgccccatcgacttacgggtggcttcttttggcggcaaaccttcttccgccatcacacgctcaacgttttctaccacaacgatagcgtcatccaccaacaggccgatggcgagcaccatcccgaacattgttagcgtgtttatcgagaagccaaaggcggcaaggacggcaaaggtaccgagcaataccaccggtacggcaatggtcggaatcaacgtcgcgcggaagttctgcaggaacagatacataaccaggaacacgaggatgatcgcttcgaccagcgttttaaccacttcgtgaatagagattttcacgaacggcgtggtgtcgtacgggtaaacaattttcagacccgacgggaagaacggttccatcttcgccagttcagcacggattgccgcagcggtatccagcgcgtttgcaccggtcgccagcttgatccccagaccggaagccggttggccgttaaactctgcgatgatgtcgtagttctcaccacccagctcaatcttcgccacatcacgcagcagtacgcgggaaccatcctgattcactttcagcaggattttgccgaactcttcagtagaggtcagacgcgtctgagcaataatagaggcgttaagctgttggcctttcaccggcggcgtaccaccgagctgacccgccgcaacctgggcgttctgcgctttgatggcggtaatgacatcaaccggcgttagctggaatttgttcagctcattcgggttcatccagatacgcatcgcgtactgtgaaccgaacaactgaacatcacccacgcccgacgtacggctgatggcatctttcatattcgccgccacgtagtcggagatatcctcctgcgtcatggtgccatcggtgttgataacgccgacaaccatcaggaagctgctggatgatttctcaacgctcaccccttgctgctgaacttcttgcggcagcaacggcatcgccagctgcagtttgttctgcacctgaacctgcgcgatatccgcatcagtaccagactcaaaggtcagggtgatctgcacggtacccgtggagtcactgttagaggacatgtacatcaggttatcgataccgttcatattctgttcgataacctgtgtcaccgtgtcctgcactgttttcgcatcagcgccggggtaggaggcggagatcgttactgccggcggtgcaatcgtaggatattgcgccaccggcagtttgaggatcgccagcccccctgccaacatgatgataatggcgatcacccacgcaaaaatcgggcgatcgataaagaaattaggcatgtcttaacggctcctgtttaagttaagacttggactgttcaggctgagcaccgcttgcggcttgctggttattatcagcggtaacttcttgtgcttttacctggacaccaggacgcactttctgcagcccacttattactacgcgatcgcctgctttcagaccttctgtcaccagccacttatcgccaatagcctggcttgcaacgatcggacgggtttccactttgtcatccgcgccaaccaccagtacggtggcatcgccacgcggcgtacgggttacgccctgttgcgggactaaaatagcgtttggattaagcccttcttccagacgtgcgcgcacgaacatacccggcagcagagtgtgatccgggttcgggaagatagcgcgtagggtgatagacccagtggtctgatcaacggtaacgtcagagaattccagcgtaccgtcctgcgggaacttaatgccgtcactggtgatcagcgacactttggctttgccgttctcttgtttcagcgtgccattcgccagttcctgtttcaggcgcaggaagtcgttgctggactgggtcacatcaacgtagatcggatcaagttgctgcacggttgccagcgcagtcgcctgaccgttctgtaccagtgcgccttccgtcacgttcgacttaccaatgcgaccgctaatcggagaggtgactttggtgtaagccagattgatccgcgcagtttcaacggcagctttcgccgcagttaccgcagcattcgcctgttgcgcatcagccagagcctgatcgtactcttgcttactgatgtactgagtaccgagcagtttctgataacgattcaccgtcaattgcgcgatattggctgcagcctgggctttcgccagatcacctttcgcactgtcgtatgtcgcctgataggtcgcaggatcaatctgatagagagagacacctgcttcgatgtcgctaccttctttgaaattacgcttcaggataatcccgctaacttgaggacgaacttctgcgatccggtaggcactggtgcgacccggaagctcggttgtgatctgcagaggttcagttttgactgttactacgccaacggcgggcatctgctggccaccttgttgggcctgtttgtcgtcacatcctgttagggctaagctgcctgagagcatcagaacgaccgccagaggcgtaaaccctctgtttttgttcatatgtaaacctcgagtgtccgatttcaaattggtcaatggtcaaaagttaataaacccattgctgcgtttatattatcgtcgtgctatggtacatacattcacaaatgtatgtaaatctaacgcctgtaaattcacgaacatatggcacgaaaaaccaaacaagaagcgcaagaaacgcgccaacacatcctcgatgtggctctacgtcttttctcacagcagggggtatcatccacctcgctgggcgagattgcaaaagcagctggcgttacgcgcggtgcaatctactggcattttaaagacaagtcggatttgttcagtgagatctgggaactgtcagaatccaatattggtgaactagagcttgagtatcaggcaaaattccctggcgatccactctcagtattaagagagatattaattcatgttcttgaatccacggtgacagaagaacggcgtcgattattgatggagattatattccacaaatgcgaatttgtcggagaaatggctgttgtgcaacaggcacaacgtaatctctgtctggaaagttatgaccgtatagaacaaacgttaaaacattgtattgaagcgaaaatgttgcctgcggatttaatgacgcgtcgcgcagcaattattatgcgcggctatatttccggcctgatggaaaactggctctttgccccgcaatcttttgatcttaaaaaagaagcccgcgattacgtcgccatcttactggagatgtatctcctgtgccccacgcttcgtaatcctgccactaacgaataaccctgaatctgactccaggatttttcctggacattttcgtcgttgctattctggttcactgcgtcgtgatattcttgcggtttgactttttcaggtcgttcttcaggttcagaaaccttcattcatcatgactatgttccagtattacaaacgatcacggcattttgttttttcagcatttattgcttttgtttttgtcttgttatgccagaacacggcgtttgcgcgggcgtcatcgaatggtgatctgccgacaaaagcggacctgcaggcgcaacttgactcactaaataaacaaaaagatctttctgctcaggacaaactggtgcagcaggatctgacagatacattagccaccctcgataaaatcgatcgcgtaaaagaagagacagttcagctacggcaaaaagtcgctgaagcgccggaaaaaatgcgccaggcgaccgcggcgttaacagcgcttagcgatgtcgataacgacgaagaaacgcgcaaaatcctgagtacgctttcgttgcgccagctggaaactcgcgttgcccaggcgctggacgatttgcaaaacgcacaaaacgatctggcgtcttataacagccagctggtttcgttacagacgcagcccgaacgcgtgcaaaatgcgatgtataacgcttcgcagcagctgcaacaaattcgcagtcgtctggatgggactgatgtcggcgagactgccttacgtcccagccagaaagtgttaatgcaggctcagcaggcgttgctgaatgcggagattgaccagcagcgtaaaagcctggaagggaacaccgtcttgcaggataccttgcaaaagcaacgtgattacgtgacggcgaacagcgcccgtctggagcaccagttacaactgttgcaagaagcggtaaacagcaagcgcctgactttaaccgaaaaaacggcgcaggaagcggtctccccggatgaagccgcgcgtattcaggctaatccgctggtgaagcaggaactggaaattaaccagcagttaagtcagcgtctgattaccgcgactgaaaacggtaatcagttgatgcagcaaaacattaaagtcaaaaactggctggagcgggcgctgcaatcggaacgcaatattaaagagcagattgccgtcctgaagggcagcctgctgttatctcgtatcctttaccagcaacaacaaacgctgccctcggcggatgaactggaaaacatgaccaaccgcatcgcggatttgcgtctcgaacagtttgaagtcaaccagcagcgtgatgcactcttccagagcgatgcgttcgtcaacaaactggaagaaggtcacgccaacgaagtcaacagcgaagttcacgatgcgttattgcaagtggttgatatgcgtcgcgaattgctggatcaactcaacaaacagttgggtaaccagctgatgatggccattaacctgcaaatcaaccagcagcagttaatgagtgtgtcgaaaaacctgaaatccatcctgactcagcaaatcttttgggtgaacagtaaccgtccaatggactgggactggatcaaagcgttcccgcaaagcctgaaagatgaatttaagtcgatgaaaatcacggtgaactgggaaaaagcctggcctgccgtttttatcgctttcctcgccggtttgccgctgctgttgattgccgggctgatccactggcgtctgggctggctgaaagcgtatcaacagaaactggcttccgctgtgggttccctgcgtaacgatagccagctcaacacaccaaaagcgattcttatcgatctgatccgtgcgcttccggtgtgcctgattattctcgcggttggcctgattctgttgaccatgcagctcaacatcagcgaactgctatggtcgttcagcaaaaaactggcgattttctggctggtgtttggcctgtgctggaaggtactggagaagaacggcgttgccgtgcgtcacttcggtatgccggaacagcagaccagccactggcgtcggcaaattgtccgcatcagcctcgcgttgctgcctatccatttctggtctgtggtggcagaactttccccgctgcatctgatggatgatgtgctggggcaggcgatgattttcttcaacctgctgctgattgccttcctggtatggccaatgtgccgcgaaagctggcgtgataaagagtcgcacaccatgcgactggtcaccattaccgtgctgtcgattatcccgattgcgttgatggtgctgactgccacgggttatttctacaccacgctgcgcctctccgggcgttggattgaaaccgtttatttggtgatcatctggaacctgctgtaccagacggtattgcgcggcttaagcgtagcggcgcggcgtatcgcctggcgccgtgcgctggcgcgtcggcagaatctggtgaaagagggcgcagaaggtgccgaaccgccggaagaacccaccattgcactggagcaggttaaccagcagacgctgcgtattaccatgttgctgatgtttgcgctgttcggtgtcatgttctgggcaatttggtccgatttgatcaccgtgttcagctatctcgacagcattacgctctggcattacaacggtactgaagctggtgctgcggtggtgaaaaacgtcaccatgggcagtctgttgtttgcgattatcgcctcaatggtggcctgggcgttgattcgcaacctgcctggtttgctggaagtgctggtgctctcgcgactgaatatgcgccagggcgcgtcgtatgccattactaccatccttaactacatcattattgccgttggtgcgatgacggtgttcggatcgctgggcgtctcgtgggataaactccagtggctggcggcagcattatccgtaggtcttggttttggtttacaagaaattttcggtaacttcgtctccggtttgatcattctgttcgaacgtccggtgcgtattggcgatacggtaaccattggtagcttctcggggacggtaagtaagatccgtattcgtgcgacaacgattaccgatttcgatcgcaaagaagtgatcatcccgaacaaagcgtttgttaccgagcgtctgatcaactggtcgttgactgacactactacgcgtctggtgatccgtctcggcgtggcctatggctccgatctggaaaaagtgcgtaaagtgttactgaaggcggcgactgagcacccaagggtgatgcacgaaccaatgccggaagtcttctttacggcatttggtgccagcacgttggatcatgagctgcgtctgtatgtgcgtgaactgcgtgaccgtagtcgtactgtcgatgagctgaaccgtactatcgatcagctgtgccgtgaaaacgacatcaacattgcctttaaccagcttgaagtgcatctgcacaacgagaagggcgatgaggtgacggaagtaaaacgcgactacaaaggcgatgacccgacgccagcggtagggtaaaaacgaaagggggcaacatttagttgccccgagattgctaacaaagtgcgcgttgttcatgccggatgcggcgtgaccgccttatccggcctacgaaaccgcaagaattcaatatattgcaggagcggtgtaggcctgataagcgtagcgcatcaggcagttttgcgtttgcccgcaaccttaggggacatttagcgaccccatttatttctcacttttccgcctcatcatcgcgcgttaatttcttttcataatcacgctttacaatatccagcgcgcgcagcacggtactggcagggatctgattttcctccagcagcacaatcaaatcgacagccagtttgacatcgtcaggggcattttccagtgacatactctctccattgctagcgggttaaacgcgctaacctgttttcgattttttccagcgcatggcggcagcgtgccaggcgcgcttcataggcttccacttcacgatgcagcgtttgctgttccacgagatcggtcacccgcgccaggcgggctctgcgttcggcaaccatctcacgtagccgccgctcaaaatcctgatgctgaatacgtttacgctgccagcgggcaattttcggtggcgcactgtcccactcgcgcaatgaccaggcggaggcttcacgcgcgatggcttccagttgtgccgccagatgttccgccagccaggccacttgcggcagctgttgctgctcaaccgcatgacgaagcgcagccaggttatcgcccgcctcatcgagacaagcttgtagtgttgtcgcacgagtctgaaaaagatgcctgtcgaaacgagcacttagcgtggcgaactgtgacaccggggcacaacgctgacgcagcgtagcgagctgtccttccagtttttccagcagcagggcggttttcacgataagacctcaatgaaaatgataattgttatgctaaagtagccactctgtaagctgacaacactcaatatgcaacgaatcattttaatcatcattggctggctggcggtagtgctgggtacgctgggcgtggtattaccggtattaccgacgacgccgtttatcctgctggcggcctggtgctttgcccgttcttccccgcgctttcacgcctggttgctgtaccgctcatggtttggcagctatctacgtttctggcagaaacatcatgcgatgccgcgcggcgtcaaaccgcgggcgattttgcttattttgctcacgtttgccatttctctgtggttcgtccagatgccatgggtgcgcatcatgttgctggtaattctcgcctgtttgcttttctatatgtggcgaattccggtgattgatgaaaagcaagaaaagcactgaagcacaacaatcgcagttgcaattattgcgtacagccagtacattctggcgttttcgagcacaggcgcaggcggtcaaaggttaaacaactgttacttttgatacgtttaaaacgcgccgtgagtaccaccgtaacaagcaggcatacacttatgaccgcgactgcacagcagcttgagtatctcaaaaatagcatcaaaagcattcaggactacccaaaacccggcattcttttccgcgatgtcaccagcttactggaagacccgaaagcttacgctctcagcatcgacttgctggttgagcgttacaaaaatgcgggcattaccaaagttgtcggcaccgaagcgcgtggcttcttgtttggcgctccggtagctctgggtctgggcgttggctttgtaccggtccgtaaaccgggcaaactgccgcgtgaaactatcagtgaaacttacgatctggaatacggcaccgatcagctggagatccacgttgatgccatcaaaccgggcgacaaagttctggtggtggacgatctgctggcaaccggcggcactatcgaagcgaccgttaaactgatccgtcgtctgggtggtgaagtggctgacgctgcgttcattatcaacctgttcgatctcggcggcgaacagcgtctcgaaaaacagggcattaccagctacagccttgtcccgttcccgggccattaattatcgccagtcttgtgctgcccacgctacggacagcacaagatgtgcattcagcctcgccgttctgacggggctgtgttagcattaccccttcgtgaatccaccttccagcgtttcagagcctgccaatgagttatcaggtcttagcccgaaaatggcgcccacaaacctttgctgacgtcgtcggccaggaacatgtgctgaccgcactggcgaacggcttgtcgttagggcgtattcatcatgcttatcttttttccggtacccgtggcgtcggaaaaacctctatcgcccgactgctggcgaaggggctaaactgcgaaaccggcattaccgcgacgccgtgcggtgtgtgcgataactgtcgtgaaatcgagcaggggcgctttgtcgatctgattgaaatcgacgccgcctcgcgcaccaaagttgaagacactcgcgacctgctggataacgtccagtacgctccggcgcgtggtcgtttcaaagtttatctcatcgacgaagtgcatatgctgtcgcgtcacagctttaacgcactgttaaaaactcttgaagagccgccggagcacgttaagtttctgctggcgacgaccgatccacagaaattgccggtgacgattttgtcgcgctgtttgcaatttcatctcaaggcgctggatgtcgagcaaattcgccatcagcttgagcacatcctcaacgaagaacatatcgctcacgagccgcgggcgctgcaattgctggcacgcgccgctgaaggcagcctgcgagatgccttaagtctgaccgaccaggcgattgccagcggtgacggtcaggtttcaacccaggcggtcagtgcgatgctgggtacgcttgacgacgatcaggcgctgtcgctggttgaagcgatggtcgaggccaacggcgagcgcgtaatggcgctgattaatgaagccgctgcccgtggtatcgagtgggaagcgttgctggtggaaatgctcggcctgttgcatcgtattgcgatggtacaactttcgcctgctgcacttggcaacgacatggccgccatcgagctgcggatgcgtgaactggcgcgtaccataccgccgacggatattcagctttactatcagacgctgttgattggtcgcaaagaattaccgtatgcgccggaccgccgtatgggcgttgagatgacgctgctgcgcgcgctggcgttccatccgcgtatgccgctgcctgagccagaagtgccacgccagtcctttgcacccgtcgcgccaacggcagtaatgacgccaacccaggtgccgccgcaaccgcaatcagcgccgcagcaggcaccgactgtaccgctcccggaaaccaccagccaggtgctggcggcgcgccagcagttgcagcgcgtgcagggagcaaccaaagcaaaaaagagtgaaccggcagccgctacccgcgcgcggccggtgaataacgctgcgctggaaaggctggcttcggtcacagatcgcgttcagacgcgtccggtgccatcggcgctggaaaaagcgccagctaaaaaagaagcgtatcgctggaaggcgaccactccagtgatgcagcaaaaagaagtggtcgccacgccgaaggcgctgaaaaaagcgctggaacatgaaaaaacgccggaactggcggcgaagctggcggcagaagccattgagcgcgacgcgtgggcggctcaggtgagtcaactttcgctaccaaaactggtcgaacaggtggcgttaaatgcctggaaagaggagagtgataacgcagtatgtttgcatttgcgctcctctcagcggcatttgaacaaccgcggtgcacagcaaaaactggctgaagcgttgagcatgttaaaaggttcaacggttgaactgactatcgttgaagatgataatcccgcggtgcgtacgccgctggagtggcgtcaggcgatatacgaagaaaaacttgcgcaggcgcgcgagtccattattgcggataataatattcagaccctgcgtcgttttttcgatgcggagctggatgaagaaagtatccgccccatttgatcgtaagcacagcttacgttcgtcatccttaacgtgattgagagagaaacctatgtttggtaaaggcggtctgggtaacctgatgaagcaagcccagcagatgcaagaaaaaatgcagaaaatgcaggaagagatcgcgcagctggaagtcaccggcgaatctggcgcaggtctggtaaaagtgaccatcaacggtgcacacaactgccgtcgcgtagagatcgacccgagcctgctggaagacgacaaagagatgctggaagacctggtggctgcagcattcaacgacgcagcacgtcgtattgaagaaacgcagaaagaaaaaatggcctctgtatcctccggaatgcagctgccgcctggctttaagatgccgttctgatgcaaaccagcccgctgttaacacagcttatggaagcactgcgctgtctgccgggcgttggcccgaagtcggcgcagcgtatggcgttcacgctgcttcagcgcgatcgtagcggcgggatgcgtctggcgcaggcgctcacccgggcgatgtcggaaatcggccactgcgccgattgccgcactttcaccgaacaggaagtctgtaacatctgttcgaatccgcgtcgtcaggaaaacggtcaaatctgtgtggtggagagtccggcggacatttacgccattgagcagacggggcagttttcaggtcgttattttgtgttgatggggcatctgtcaccgctggacggcatcggtccggatgatatcgggcttgatcgtctggaacagcgtctggcagaggaaaaaatcactgaagtgatcctcgccaccaatcccacggttgaaggtgaagctaccgctaactacattgccgagctttgcgcgcaatatgacgtggaagccagccgaatcgctcatggcgtaccggttggcggcgagctggaaatggtcgacggcaccacgttgtcacactcccttgccgggcgtcataagattcgtttttaagcaaacgagagcaggatcacctgctctcgcttgaaattattctcccttgtccccatctctcccacatcctgtttttaaccttaaaatggcattattgaggtagacctacatgaaaggacaagaaactcgtggttttcagtcagaagtgaaacagcttctgcacctgatgatccattctctctattccaataaagaaatcttcctgcgtgagcttatctctaacgcctccgatgcggcggacaagctgcgtttccgtgcgctctctaacccggacctgtacgaaggtgatggcgaactacgcgttcgtgtctctttcgataaagacaagcgtacgctgaccatctccgataacggcgtggggatgacccgcgacgaagtgattgaccatctggggactatcgctaaatccggtaccaaatcattcctcgaatccctgggttctgaccaggcgaaagacagccagctgatcggtcagtttggtgttggtttctactctgcgtttatcgtggccgacaaagtgaccgtgcgtactcgcgcggcaggcgaaaaaccagaaaatggcgtcttctgggaatcggctggcgaaggtgaatacaccgttgccgacatcaccaaagaagatcgtggtactgaaatcaccctgcatctgcgtgaaggcgaagacgagttcctcgatgactggcgcgtgcgttccatcatcagcaaatactccgaccatatcgcgctgccggtagagatcgaaaaacgcgaagagaaagacggcgaaaccgttatctcctgggagaaaatcaacaaagcgcaggcgctgtggactcgtaacaagtcggaaatcaccgatgaagagtacaaagagttctacaaacacatcgcccacgactttaatgatccgctgacctggagccacaaccgtgttgaaggtaagcaggagtacaccagcctgctgtacatcccgtcccaggctccgtgggatatgtggaaccgcgatcataaacacggcctgaaactgtatgttcagcgtgtgttcatcatggacgacgcagaacagttcatgccgaactatctgcgcttcgtgcgtggtctgattgactccagcgatctgccgctgaacgtttcccgtgaaatcctccaggacagcacggtaacgcgtaacctgcgcaatgcgctgaccaagcgtgtgctgcaaatgctggaaaaactggcgaaagacgacgcggaaaaataccagaccttctggcaacagtttggcctggtactgaaagaaggtccggcggaagatttcgctaaccaggaagcgatcgccaaactgctgcgttttgcttctacccataccgattcttctgcgcagaccgtatctctggaagactacgtttcccgcatgaaagaagggcaggagaaaatctactacatcaccgcagacagctatgcggcagcgaagagcagcccgcacctggaactgctgcgtaagaaaggcatcgaagttctgctgctttccgaccgcatcgatgagtggatgatgaactatctgactgagttcgacggtaaaccgttccagtcggtgtctaaagttgacgagtcgcttgaaaaactggctgacgaagttgatgagagcgcgaaagaagcggagaaagcactgactccgttcatcgaccgtgtgaaagccctgctcggcgagcgcgtgaaagatgtccgtctgactcaccgtctgaccgatacgccagcgatcgtttcgaccgacgcggacgaaatgagcactcagatggcgaaactgttcgctgcggcgggccagaaagtgccagaagtgaaatacatcttcgaactgaacccggatcacgtactggtgaaacgtgcggcagatactgaagatgaagcgaagttcagcgagtgggtagaactgctgctggatcaggcgctgctggcagaacgcggcacgctggaagatccgaacctgtttattcgtcgtatgaaccagctgctggtttcctgatgtaatgccggatgaccttcgtgtcatccggcatttttcttttcatcatctgcactttccgcaaattatctcgccattaaccgtttcagccccaggtgcctttcttgaggcaatcgcctgttggtggtatcgtttatcgctttttcaaaaaattcgacacattttaaggggattttcgcaatgcgtatcattctgcttggcgctccgggcgcggggaaagggactcaggctcagttcatcatggagaaatatggtattccgcaaatctccactggcgatatgctgcgtgctgcggtcaaatctggctccgagctgggtaaacaagcaaaagacattatggatgctggcaaactggtcaccgacgaactggtgatcgcgctggttaaagagcgcattgctcaggaagactgccgtaatggtttcctgttggacggcttcccgcgtaccattccgcaggcagacgcgatgaaagaagcgggcatcaatgttgattacgttctggaattcgacgtaccggacgaactgatcgttgaccgtatcgtcggtcgccgcgttcatgcgccgtctggtcgtgtttatcacgttaaattcaatccgccgaaagtagaaggcaaagacgacgttaccggtgaagaactgactacccgtaaagatgatcaggaagagaccgtacgtaaacgtctggttgaataccatcagatgacagcaccgctgatcggctactactccaaagaagcagaagcgggtaataccaaatacgcgaaagttgacggcaccaagccggttgctgaagttcgcgctgatctggaaaaaatcctcggctaattcgaaagcgcgcacggacagtcccctcgccccctcggggagagggttagggtgaggggaacaggcccgcacaagcaaacttatcagcaatctcaggccggatattcattcggccttttacaaaaacctcaatctgcgctattcctttttctgatttgacctctcacagcaattagttcttcttcctcacttttccgctacaattatcaacaagttgaatcgataagaggcggtaatgcgtcagactaaaaccggtatcctgctggcaaacctgggtacgcccgatgcccccacacctgaagcggtaaaacgctatctgaaacaatttttaagcgacagacgcgtggttgatacctcacggttgttatggtggccattgctgcgcggcgtgattttgccgctgcgctcgccgcgtgtggcgaagctgtatgcctctgtctggatggaaggtggctcgccgctgatggtttacagccgccagcaacagcaggcgctggcacaacgtttaccggagatgcccgtagcgctgggaatgagctacggctcgccatcactggaaagcgccgtagatgaactcctggcagagcatgtagatcatattgtggtgctgccgctttatccgcaattctcctgttctacggtcggtgcggtatgggatgaactggcacgcattctggcgcgcaaacgtagcattccggggatatcgtttatacgtgattacgccgataaccacgattacattaatgcactggcgaacagcgtacgcgcttcttttgccaaacatggcgaaccggatctgctactgctctcttatcatggcattccccagcgttatgcagatgaaggcgatgattacccgcaacgttgccgcacaacgactcgtgaactggcttccgcattggggatggcaccggaaaaagtgatgatgacctttcagtcgcgctttggtcgggaaccctggctgatgccttataccgacgaaacgctgaaaatgctcggagaaaaaggcgtaggtcatattcaggtgatgtgcccgggctttgctgcggattgtctggagacgctggaagagattgccgagcaaaaccgtgaggtcttcctcggtgccggcgggaaaaaatatgaatatattccggcgcttaatgccacgccggaacatatcgaaatgatggctaatcttgttgccgcgtatcgctaaagctgagcggtaaagaactgagcgccgtcgcgaagagcctcgtcggcggttttcatcatccgtgaataatgcaaaaaggcgtgcagcgtgcctgggtagagtttgaactcacagggctgctgatgcgccgctaacgtctggtaaagcagacggctgtcatccagcagcggatcgaactccgccccggcaataaaacagggcggaacttcgcgagtgagatcattattaaacagacagtaatacggcgactcgcggtccgcgtcgttgcttaaatatgcctcttcgtacatctgcaaatcctgttgcgttaagccatcccagacaccgcccaacagacgacgagtcacggaatcccgtaatccgtaaagcccataccacagcaaaacgcccgcaactttaccgcaatcgatctgtttatcacgcaaccacaacgcactggcgagcgccagcatggcacctgcggaatcaccggcaaagccaatgcgggacatattgatttgataatcctccgcctgctggtggaaataacaacaagcagccacaatttcctctatcgcttgcggaaaacgcgcttcaggtgaaagggtgtaatcaataccaatcaccgtacattggctgtagcttgccagcaggcgcatgatgcgatcgtgggtatcgagattgccgagaataaaaccgcctccatgcaaataaaatagcgtcgctgggctatctggctgcggacaaaagagatgtgtttccacctgcccatattttgttggaaccatgtaagctctggttgccatttctggagcgcccgcattccagaatcggcgctcaagcgtgtaatactgtcgttgctcagcaatcgttcccgttgcgggccagggcggtaaatccggctgaagagtattcacaacggtcttcatttcagcagaaataaggtccagaacgggtaatttgttttccggcttcatacaaaaactcctttcaaattacgtcattgtaaggaaccactgccatgaaaatgcgatcccgcctgctgatattgaaactggctgcgtctcgcgcgctcccgtcagattgtgttaacattcgccgctcagttaaccacccgtaaaaacaaccatgaaatttcccggtaaacgtaaatccaaacattacttccctgtaaatgcacgcgatccgctgcttcagcaattccagccagaaaacgaaaccagcgccgcctgggtagtgggtatcgatcaaacgctggtcgatattgaagcgaaagtggatgatgaattcattgagcgttatggattaagcgccgggcattcactggtgattgaggatgacgtagccgaagcgctttatcaggaactaaaacagaaaaacctgattacccatcagtttgcgggtggcaccattggtaacaccatgcacaactactcggtgctcgcggacgaccgttcggtgctgctgggcgtcatgtgcagcaatattgaaattggcagttatgcctatcgttacctgtgtaacacttccagccgtaccgatcttaactatctacaaggcgtggatggcccgattggtcgttgctttacgctgattggcgagtccggggaacgtacctttgctatcagccctggccacatgaaccagctgcgggctgaaagtattccggaagatgtgattgccggagcctcggctctggttctcacctcttatctggtgcgttgcaagccgggtgaacccatgccggaagcaaccatgaaagccattgagtacgcgaagaaatataacgtaccggtggtgctgacgctgggcaccaagtttgtcattgccgagaatccgcagtggtggcagcaattcctcaaagaccacgtctctatccttgcgatgaacgaagatgaagccgaagcgttgaccggagaaagcgatccgttgttggcatctgacaaggcgctggactgggtagatctggtgctgtgcaccgccgggccaatcggcttgtatatggcgggctttaccgaagacgaagcgaaacgtaaaacccagcatccgctgctgccgggcgctatagcggaattcaaccagtatgagtttagccgcgccatgcgccacaaggattgccagaatccgctgcgtgtatattcgcacattgcgccgtacatgggcgggccggaaaaaatcatgaacactaacggagcgggggatggcgcactggcagcgttgctgcatgacattaccgccaacagctaccaccgtagcaacgtaccaaactccagcaaacataaattcacctggttaacttattcatcgttagcccaggtgtgtaaatatgctaaccgtgtgagctatcaggtactgaaccagcattcacctcgtttaacgcgcggcttgccggagcgtgaagacagcctggaagagtcttactgggatcgttaagttatcgtcggttcgtaggccagataaggcgttcacgccgcatctggcatttggctctcgatgcctgatgcgacgctggcgcgtcttatcatgcctacatatttttcatattttacatccggcaaccaccgtttaccccgtcaccacctcacccgccggtggcgtttccagcagttccagcatggtacgggcgatttcacgctcgcccatcactacctgattcgcaccacgttcggtgatatacgccacttcatcgtcataatgggcgcgggcaataatctcaatatccggatttttcgcgcgggcagatgccacaatctcacccgcttcataaccgttgggaatcgtcaggatcagccattttgcacattccagatgcgccagttgcataatttcttcgttcgccgcattgcccaatactgcgcggaccccgcgctctcgcagctcatcaacacgggttcgtgacgtctcaatcaccaccagcggaatatcagaggcgagcaatttctcccccagcaggctgcctacacgaccgtaacccaccagtagcgcatggttgcaaatatccactgggatctgcttctcttcttcgattgcctcttccagcgtctgctcttccagcgtttcggtcttcgccagatatttctccagtagtgcgaacagtaccgggttgagcataatcgacaggatcgcccctgccagtaccaggttttgtccggcctgcggcagtaaattcaatgccattcccagtcccgccaggataaacgcgaactcaccaatctgcgccaggctggcggcgatggttaatgccgtacgttgggagtgaccaaacagtcgcaccaggaaaaatgcggctaacgacttaccaaacagaataatcgccagcgtcgccagcactgccagcggttgctgaatcagaattaacggatcaaacaacatcccgacggagacaaaaaacagcaccgcaaacgcgtcgcgcaatggcagcgtatcgtgggcggcacggtgactcagttcagactcgttcagtaccatcccggcaaagaacgcaccgagtgcaaaggagacatcaaacagctctaccgcaccaaaggcaacccctaacgccagcgccagcaccgacagggtaaacagctcgcgagaaccggttgccgcgctgcgtgccataatccacggcaccagacggcgacctaccagcatcataatggcgataaatgcgatcactttgccgatggtgatccccatatcgactgcaagagtggcaaagcccacatcgccctgttccatcattcctgccactgcgggcagcaacaccagcgtcagaaccattaccaggtcttccacaatcaaccaaccgatggcgatttgcccacgctgactgtcaattaattgccgttcttcaagtgcgcgcagtaacaccacggtactggcggtggaaagacataaaccgaacacgataccggtcattaacgaccagcccagcacggcagagagcgccatacccagcagcgtcgccacggctatctgggcgatcgcaccgggaatggcgatggcctttaccgccatcaaatccttcagcgaaaagtgcaaaccgacgccaaacatcaacagaatgacgcccagttcagccagttccggggcaagcttggtatcggcaacaaagcccggagtgaatggtcctgccagcacacccgctaacagatatcccaccagaggagaaatacgtagtttattggccagcatgccgaggataaaggcgagcacaaggccgccaacaatggtggtgataagcggggtggcgtgatgcattccgtctccttttcctggtggttattgtccatttttggccgggaaaaccaaaattacaggtaatagtttatgacaatttcattgatgatgtttatgaataattgttgaattttgcagaaaaatggaattagctgcaaaaaaagcacggatcggaaaacagaaggcggtttaacagaggaaaggcttatggcgactgtaaaacgatgcagccaaagtttgcctttggctgcaatgaaatcagtctttatgccggttatcaggcaggaatatggtcaacatccccaatagtggcaggaaagcacagattttatagactaactcgatgctggtgtgatcggcgataagccccagaactgccgcacccagacctcccatgccgaaagcaaaaccgaaaaagagtccagaaaccataccgatacgtcccggaagcagctcctgagcgtaaaccagaatggcagagaatgccgaagcgaggataaatccaataatcaccgttaaaacccccgtccagtgcaggctggcgtagggtaaaatcagcgtaaacggcgcaacgccgaggatagagccccaaatcacatatttcctcccaattttatcccctacaggcccgccgatcaccgtacctgccgcaacggcaaacaggaaggcaaacagatgaagctgagcattctggatagataatccgaatttttgcatcagatagaaggtgtaatagctgctgatgctcgccatatagaaatatttcgagaaaatgaggattaacagaatgctgaccgccagtaccactttgttgcgcggcagtggattgataatcgtcgctttgggttttcctttattcattcggtgctgtgccgagtaccaacggctgatttgtgccaacaccacgatcgccagcagtgccgcaagcacaaaccaggcaacgttgcctttgccataaggcgcgataatcaccgccgccagcaagggtcccagggaactgccaaagttgccgccgacctgaaagatagattgtgccaggccatgccgcccgccggaagccatacgggccacgcgagaagattccggatgaaagaccgatgaaccggtaccgaccagcgccgccgccagcagaactgcgccaaaactgcccgccagcgcaagcagcactagaccacttaaggtaaagcacatgccaattggcaacgaccatggcattggatatttatcggtccagtagccgaccactggttgcagtagcgaagaggcgagctggaaggtgagggttatcatgccaatctgcataaatgtcagagaaaattctgactgaagcagcggataaatcgccagaatcagcgattggatcatgtcgttcagcagatgtgagaggctgatagcacctaaaataccaaacgatgttcgggccttggtcgttgacgcagccgcgcccgccacaggctgggtttgttcactcattgccataggaaagtcactttttcagggttgcgatgtaaagaatgatcttatttgtgattattacccgactaacatacctgtatgcgtcgcctgaaggaagtctcaacgccgaatacagaatttctaatctggatgcagatttatcttcaccggacgcagacttgtctatgatgtcgcgtcatactatttttcaacacgttgaaatcaggtcagggagagaagtatgaaattattgcagcggggcgtggcgttagcactgttaaccacatttacactggcgagtgaaactgctctggcgtatgagcaggataaaacctacaaaattacagttctgcataccaatgatcatcatgggcatttttggcgcaatgaatatggcgaatatggtctggcggcgcaaaaaacgctggtggatggtatccgcaaagaggttgcggctgaaggcggtagcgtgctgctactttccggtggcgacattaacactggcgtgcccgagtctgacttacaggatgccgaacctgattttcgcggtatgaatctggtgggctatgacgcgatggcgatcggtaatcatgaatttgataacccgctcaccgtattacgccagcaggaaaagtgggccaagttcccgttactttctgccaatatctaccagaaaagtaccggcgagcgcctgtttaaaccatgggcgctgtttaagcgtcaggatctgaaaattgccgttattggtctgacgacggatgatacagcgaagttaggcaatccagaaaacttcaccgatattgagttccgtaagcccgccgatgaagcgaagctggtgattcaggagctgcaacagacagaaaagccagacattattatcgcggcgacccatatggggcattacgacaatggtgagcacggctctaacgctccgggcgatgtggagatggcgcgcgcgctgcctgccggatcgctggcgatgatcgtcggtggtcactcgcaagatccggtctgcatggcggcagaaaacaaaaaacaggtcgattacgtgccgggtacgccatgcaaaccagatcaacaaaacggcatctggattgtgcaggcgcatgagtggggcaaatacgtgggacgggctgattttgagtttcgtaatggcgaaatgaaaatggttaactaccagctgattccggtgaacctgaagaagaaagtgacctgggaagacgggaaaagcgagcgcgtgctgtacacccctgaaatcgctgaaaaccagcaaatgatctcgctgttatcgccgttccagaacaaaggcaaagcgcagctggacgtgaaaataggcgaaaccaatggtcgtctggaaggcgatcgtgacaaagtgcgttttgtacagaccaatatggggcggttaattctggcagcccaaatggatcgcactggtgccgactttgcggtgatgagcggaggcggaattcgtgattctatcgaagcaggcgatatcagctataaaaacgtgctgaaagtgcagccattcggcaatgtggtggtgtatgccgacatgaccggtaaagaggtgattgattacctgaccgccgtcgcgcagatgaagccagattcaggtgcctacccgcaatttgccaacgttagctttgtggcgaaagacggcaaactgaacgaccttaaaatcaaaggcgaaccggtcgatccggcgaaaacttaccgtatggcgacattaaacttcaatgccaccggcggtgatggatatccgcgccttgataacaaaccgggctatgtgaataccggctttattgatgccgaagtgctgaaagcgtatatccagaaaagctcgccgctggatgtgagtgtttatgaaccgaaaggtgaggtgagctggcagtaatccgaaagtgccggatgtttgcatccggcacaatgcttaatcgcggcgggcgatatcagcaaatttggcatcgaggatctttgccagatcgcctgccgccagttcgatatccagtccgcgcttgccgccggaaacataaatagtggcaaattcttgtgcgggggcgtcgataatcgttggcagacgttttttctgccccagtgggctaatccccccaaccaggtatcccgtcgaacgctgcgcgaccatcggatcggccatctcaactttcttggcacccagcgcttttgctacttttttaagatccagttgacctgcgaccggcgtaacggccacggcaaggtgtttcatatcaccgttcactgccaccagcagcgttttgtagacctgatccggattcaaacctaattttttgacgacttcatcgccaaaattggtttcagccggatcgtgctcgtaggtatggatttgaaacgaaatcttgtttttttcgagtaatttaactgcgggtgtcatggtaattttcctgccttaaacaaaaaaacgaagcaagcatacgcctgatggcggtccaaaaaaaagagtcatcttgcctaagagtattggcaggatggtgagattgagcgacaatcgagttacaccgtcgcttaaagtgacggcataataataaaaaaatgaaattcctctttgacgggccaatagcgatattggccatttttttagcgcaacatttgcggtaaattcccttctccatacaggtgtagtgcaccgaccgcgaccacatatcgccccggcggcatggcgcgtaatttatcccgccaggcgagatttcgctgatgcatcagcacatcgtacagcgactgactgaacgtattgggcagcgttatatcattattttgcggcggtgcattcagccaccagctcatcatttgttgcagcaaccgtgcgttggtatgccagtgggtcagcgtatcgtccagcagcgccagtcctttgtcagggagctggagcaacatggcaatctggttttcagccccttccagttcaatcacgggtttatgttgttgcttcgccgcctgcaatagctggtaatcgataccgtattctgcccgcagccccagtttttgtgcctgcgtcgcctgaagaaccatcgcgatttgccacagcggttgggtagaaaagagtgagggagaaatgcccatctcctggctaatgtgctgcaggttttggagttgctcctcgctaatgcgctcttccagcgcctcgcaggcaggcaaattagcaaaaggcgtatcgctggtggaaacatccgcctcgacgatcagcgcatcggcgtttttgagctttttgagcaaacgggtgggcaggggagccatatcgtggctacccatatgaatgctgccaatcagatgaaaatggcgattgccggggagggtgatatcgatggcaggccaggagtaatgattaccgcgcagcgcggcccaaagcgtttttacccggtacaacagatccatacgacctccctttgtgaaatatcatgctagcgcgcggggagggatggcgcaaatggagttggggacttgtttaatgtgtttgtatgattcagtatgttcttgtatcgctattcacagggaagcaacagttaaaaactatgaaacaggcaacaagaaaaccgacgacacccggagatattcttctctatgaatatctggaaccgctcgatttgaaaatcaatgagttagcagagttgctgcatgttcatcgtaatagcgtcagtgcactgatcaataacaatcgtaaactcaccactgagatggcattccgtctggcgaaagtttttgataccacagtcgatttttggctaaacctccaggcggcagttgatctttgggaagttgaaaacaacatgcgcacccaggaagaattgggacggattgaaacagtggctgaatatttggcacgccgtgaagagcgtgcaaaaaaggtcgcgtaaggccaaaacatcgcttcatctcgtaggccggataaggcgttcacgccgcatccggcatccgagcaccattgcctgatgcgacgcttacccgtcttatcaggcctacaaacttgtgcctgaaccgtaggccggataaggcgtttacgccgcatccggcatccgagcaccattgcctgatgcgacgcttacgcgtcttatcaggcctacaaacctgtgcctgaaccgtaggccggataaggcgtttacgccgcatccggcagtcatgcgtcgatgccaaatgcgccaccctaaagcagcgcatccgcaatgatgtacttattccttcggtttaaaccgcagcaaccggttggcgttactcactacggtaatcgacgagagcgccattgccgctccggcaactaccgggttaagcagtgttccagtgaacggccacaaaataccggcggcgaccggaataccgatactgttgtagataaacgcaccgagcaggttctgcttcatgttgtgcagcgttgcgcgggaaatagcgagcgcatccgcaacgcccatcaggctatggcgcatcagggtaatcgccgcggtttcaatggcaacatcactgccgccacccatcgcaatgccgacatccgcctgagccagcgctggcgcgtcgttaatgccgtcgcccaccattgccacctgacgtccttcactttgcagatgtttgatcgcttcggctttaccgtccggcagcaccccggcgatcacctcatcaatccctgcttctttggcgatcgcattggcggtggttgggttatccccggtcaacatcaccagacgatatcccgctttatgcaggcgttgcagcgccgccacgctatcactacgcaacggatcgcgtactgccagcagggctaccgctttcccgtcaaccgccagcagcacaggcgttgccccttgcgatgcctgagcagtaatctccgcttcgatagctttggtaccaacctgttgctcatttaacagcgcctgattgcccagcaataacgcatgaccttcagcttcaccgctcacgcccagcccgcgcaatgtgcggaaaccgttgacctgcggtagctgcatatcacctgctttatcgaggatcgcccgtgccagcggatggctggaaccttgctccagtgccgccgccagacgcaatgcctgcgcttcatcaacatcagcaaatgttttcactgcgacaacctgcggcttcccttcagtcagcgtcccggttttatcgaacactacagtgtcgagtgtactggcgcgttgcagcgcgtcagcgtcccgcaccagcacgccaaactcagccgcccgcccgacgccggaaataatcgacatcggcgtcgccagccccagcgcacacggacaggcaataatcagtaccgtggtggcaatcaccagggtatagacaatctgcggtgccggaccaaagaaataccagattgccgcactgacaagcgcaataaccaccactaccggcacaaatacggctgagattttatccgccagctgaccgatttctggcttgctgctctgggcctggcgcaccatgcgaatgattcgtgacagcgtagtatggctgccaaccgcactggcacgaaacagcacactgccgtcctgtaccactgtcccggcatggacgctatcgccttcgcctttttgctgcgggattggttcgcccgtcagcatcgcttcatccagccatgcttcgccctgggtaatctcgccatctaccggcacgcgatcgccggtcgtcaggcgcagcaacatacctggctgcacttctgccagaggcacgcttttttcaccttcgtcagtaaccaggcgtgccgtcggcggggttaaatcgagtaacttttccagcgccttagaagaacgctggcgtgcgcgcgcttccagcatatggccgagattgatcagaccgataatcatcgcgctggcttcgtaataaagatgtcgcgcttccatcgggaaccactgcggccacaggttgacgctcatcgaatagagccacgccacgccagtacccagcgccaccagcgtatccatcgtcgccgcaccgttcagcaggcttttccatgcactgcggtaaaaatggccgccggcgaaaaccatcactgccagggttatcaggccgataaccaaccacaggctgcggttgtcagcggtgaccatcatgttatcgccgatcatcccccagaccatcaccgggatacccaccgccagtgcgacaattgcctgccagcggaagcgcttcatcgtagcgacggcggtttcttgctggcgctcgcggcgtttagcgtcatcttcaatcgcttccgcgccgtagcccgctttttccaccgcctgcactaaatcttgtggggaggcactgcccatcaccagcgcagtacgctccgccaggtttacccgtgcctgagtgacgcccggtacgctttgcagcgcattttgtacgcgggtgacacagctggcgcagctcatgccgctcagcagcaactgctggctgtcatcgtcatcggcggtcgctgccggaagcgcctcagaaaccgctgtcagtgcttccgacgggattgatgactccgccagcggtttagcctttgggtggcttacagatgcgtcataacccgcttgtttgatggtttcgatcagctgttctgcactggcagtcccggtaacgtgcgcttcagtgatagacacatccgcctgctcaacatccggacgctgttcaagactttctttcacgcgtttaacgcagtgaccgcaggacaggccgtccagggtcaggtcgatagtttgtgacataaaacactcctttaagacagttttgactggctgtgataaaggttaaaccttccagcaaggggaaggtcaagaaattaataaaccaggcgggtaaaagtccgtaaagattaaaaaatcggctcgatttgcatcaggattagacatttatctctttgttttcctgtagttaagttgcgggtgctaagttaaatcaggatgcctgaaaatcggcaccggggtgaggaattacctcccgcatctataaaaaggagttaacaaaagatgttagatgcaaacaaattacagcaggcagtggatcaggcttacacccaatttcactcacttaacggcggacaaaatgccgattacattccctttctggcgaatgtaccaggtcaactggcggcagtggctatcgtgacctgcgatggcaacgtctatagtgcgggtgacagtgattaccgctttgcactggaatccatctcgaaagtctgtacgttagcccttgcgttagaagatgtcggcccgcaggcggtacaggacaaaattggcgctgacccgaccggattgccctttaactcagttatcgccttagagttgcatggcggcaaaccgctttcgccactggtaaatgctggcgctattgccaccaccagcctgattaacgctgaaaatgttgaacaacgctggcagcgaattttacatatccaacagcaactggctggcgagcaggtagcgctctctgacgaagtcaaccagtcggaacaaacaaccaacttccataaccgggccatagcctggctgctgtactccgccggatatctctattgtgatgcaatggaagcctgtgacgtgtatacccgtcagtgctccacgctcctcaatactattgaactggcaacgcttggcgcgacgctggcggcaggtggtgtgaatccgttgacgcataaacgcgttcttcaggccgacaacgtgccgtacattctggccgaaatgatgatggaagggctgtatggtcgctccggtgactgggcgtatcgtgttggtttaccgggcaaaagcggtgtaggtggcggtattctggcggtcgtccctggagtgatgggaattgccgcgttctcaccaccgctggacgaagatggcaacagtgttcgcggtcaaaaaatggtggcatcggtcgctaagcaactcggctataacgtgtttaagggctgatcatgatgaacacggaaggtaataacggtaacaaacctctcggtctatggaacgtcgtttccatcggcattggggcaatggtgggggcggggatcttcgcgctgctggggcaggctgcattgctaatggaagcctcgacctgggtcgcctttgcttttggcggtattgtggcgatgttttccggttatgcctatgcgcgtctgggggcgagctatcccagcaatggcggcattatcgacttctttcgtcgcggattaggcaacggcgtcttttcgctggcgctctcgttactgtacctgttgacgctggcggtgagcatcgccatggtcgcccgtgcttttggcgcttatgccgtgcagtttttgcatgaaggcagccaggaggagcaccttattttgctctacgcgttggggatcattgcggtgatgacgcttttcaactccttaagcaaccatgcggtagggcggctggaagtgatcctcgtcggcattaaaatgatgatcctgttattgctgattattgccggtgtctggtcgctgcaaccggcgcatatttccgtctctgcgccccccagctccggtgcgttcttctcctgtattgggataactttccttgcctatgcgggctttggcatgatggcgaacgcggcggataaagtgaaagatccgcaggtcattatgccacgggcgtttctggtggcgattggcgttaccacgttgctttatatctcgctggcactggttttgcttagcgatgtatcggcattagagttagaaaaatatgccgataccgccgtagcgcaggctgcttctccgctgctcgggcatgtgggttatgtgatcgtcgtcatcggcgctttactggcgacggcttcagccattaacgcgaacctgttcgccgtgtttaacatcatggacaacatgggcagcgaacgcgaactgccgaagctaatgaataaatccctgtggcggcagagtacctggggcaacattattgtcgtggtgttgattatgctgatgacggcggcactgaatttaggctcactcgccagcgttgccagcgccacctttttgatttgctacctggcggtgtttgtggtggcgatccgcctgcgtcatgatattcacgcctcgttgccgattcttatcgttggtacgttggtgatgttgttggtgatcgttggctttatctacagtctgtggtcccagggtagccgtgcgttgatatggattattggctcactcttactcagccttattgtggcaatggtcatgaagcgcaataaaaccgtataacatctctctgtgcgcagtacttcctgtattattgtggtggcggtcgatattcgcactggcaaaaaaacgtgcttgaatatctgttgaaaccctttaacaaagcacaggaggcgttgcgcgaacgatgaacatcagcgatgtagcaaaaattaccggcctgaccagcaaagccattcgcttctatgaagagaaggggctggtgacgccgccgatgcgcagcgaaaacggttatcgcacctacacgcagcagcatctcaacgaactgaccttactgcgccaggcacggcaggtgggctttaacctggaagagagcggcgagctggtgaatctgtttaacgacccgcagcggcacagcgccgacgtcaaacggcgcacgctggagaaggtggcggagatcgaacgacacattgaggagctgcaatccatgcgcgaccagctgctggcactggcgaatgcctgccctggcgatgacagcgccgactgcccgattatcgaaaatctctccggctgctgtcatcatcgggcagggtgattaagacgagacggctcggatatgtagggttatcccttctatcgcaatgacttcaacatgcgtacctgcaccgagatcctcgctggcgctgacaggccatgaactgtcaccgacgcgcatatgaccgcgcccgttgaccagcggagattccagcacaaaacgtcggccaatcagctgctgcccgcgctggtttaaatgactatcgctgtgcttttgttcgcgcacccgccgcgacaaccatttccaccacagccaggcggcgagcagcgtcaggatggcaaacattaccccttgccactcccaacccagcggcaccagccagaccaccaggccggtaatcaccgctgccacgccgctccacaacaaataaccatttccgcccagcatctcggctgccagcagcaaaccgccgagactgagccagaaaatatgtggatgaacgaccattaactccatcatggctgagtccgtttgttggcgctgtctttcaccagctcggcaatcccggcaatcgaccccatcaggctgctggcctctaatggcatcatcactactttgctgttactggaggaaccgatctgctgtaacgcttcggtgtatttctgcgctacgaagtagttcaccgcctgaatatcaccggaggcgatagcttcagacaccattttggtggcgcgggcttctgcttcggcggaacgttcacgcgcttcagcctgtaaaaacgccgactgacgttcgccttccgctttcaggatttgcgactgtttttcaccttcggctttgaggatttccgcctgacggatcccttccgcttcaagaatgtaagcgcgtttggtacgttccgctttcatctgcgcgttcattgaagagataagctctgccggtgggcgcacgtcgcgaatttcaatacgggtgactttaatcccccacgggttggtggcttcatcgacaatacgcagcaggcgtgagttgatgctgtcgcgctgagagagcatttcgtcaagttccattgaacccagcacggtacggatgttagtcatggtcaggttgatgatcgccagctccagattgctgacttcataagccgcgcgcggcgcgtcaatcacctgaataaagcacacggcgtcgatggtaacgttggcgttatctttcgagataacttcctgggaagggatatcgagcacttgctccatcatattgatcttgcgaccaatgcgatccataaacggcaccaccagactgagccccggctgtaacgttttggtatagcgaccaaagcgttctactgtccactgatagccctgcggtacgattttgacacccgcgccgacaatgaccagcgcgacaaaaatgagaatcgggataaagataagcatcggaaaaacctcctgttgtaccgtccataatcagcaaaattgctgcttgattaaacaaattatacctgattactgaaagagagttcccccttattcctgcgaaggataaactgtttttagtaaaaatcagaaaaagggaacagcgatgcaggaaaatagtcctttgcttcagctacaaaacgtaggatatctggcgggtgatgcgaagattcttaataacatcaatttttcgctgcgtgctggcgaatttaagttaattaccggtccttctggttgtggcaaaagtacgctgctaaaaatagttgcttcattgatcagcccaaccagcggaacgttactgtttgaaggtgaggatgtcagcacactaaagccagaaatctaccgccaacaagtctcttactgcgcccagacaccgacgctgtttggcgatacggtatacgataatctgatctttccctggcagatccgtaaccggcagcctgacccagccatttttctcgattttctcgaacgcttcgccttgccggacagcattttgacgaagaatatcgccgagctatctggtggtgaaaaacaacgcatctcattgattcgtaacctgcaatttatgccgaaggttttattgctggatgaaataaccagtgcgctggatgaaagtaataaacataacgtcaatgagatgatccatcgttatgtgcgcgagcaaaatattgccgtgctgtgggtgacacacgataaagacgaaattaatcatgcggataaagtgattacactgcaaccgcatgccggagaaatgcaggaagcacgctatgaactcgcataatattactaacgaatcattagcactggcattaatgctggtggtggtggcaatcttaattagccataaagaaaaactggcgctggagaaagatattctctggagcgtcgggcgagcgataattcagctgattattgtcggctatgtgctgaagtatattttcagcgtggatgatgccagcctgacattattgatggtgttatttatctgctttaatgcggcgtggaacgcgcaaaaacgcagtaaatatattgctaaagcttttatctcatcgtttattgccattacggtcggggcgggaattaccctggcggtgctgattctctcagggtcgattgaatttatcccgatgcaggtgatccctatcgccgggatgattgccggtaacgccatggtagcggtggggttgtgttacaacaatttagggcaacgggtcattagcgaacagcaacagattcaggagaaactgagtcttggtgcgacgccgaagcaggcttcagcgatattgattcgcgacagtattcgcgcggctttaattccgacggtcgattcagcaaaaacggttggcttagtgagtttaccaggaatgatgtccgggctgatatttgccgggattgatccggtgaaggcgattaaatatcagattatggtgacctttatgctgctctcaaccgccagcttgtcgaccattattgcctgctatttaacctatcgtaagttttataattcgcgccaccagttggtggtgacgcaattgaagaagaaatgatgcgatgccggatgcgcagcatcgcatccggcgttgtggttcatgtgccgatcaacggaatatcaatacaacaatgcatacagctggcggcgatacttcgacgccagtgcatcacccgtacccagcgcagcgaggatctcctggaacgttttacgcgtctgaccgtctgcggcggtgagatctttacgcagatgcccgaacagcaactccagcgcctcttcattgcgcccaacctgatgcagttgcagcgccagttgcgtcgccagtgcggcatcttctggattctccgccacctgctgttgcaactgttgaatttccggcgtatcagccgcctgcttcagcagttcgatttgcgccaccagcccctggtagcgggtgtcctgatcctgcaacggaatggttttcagcaccgcttccgcatcttcagaacggttcagcgcaatcagcgtttctgccagcagcaggccgatctccccgttctgattcgacaactgccaggcgtctttcagcaatggcagggcatcggtgtaattgctttcctgcatcagttgcatcgcctgctgcgctttcagctcttcttcgcgcggcagcactttatccagcagggcgcggatcgcctcttccggttgcggcccctggaagccatctaccggttgcccgttctggaacagatacacggtcggaatcgcacgcagaccaaactgcgcggcaatcatctgctccgcgtcgcagtccagcttcgccagaataaattgcccgttgtactgcgccgcgaggctttccagaattggggttaactgcaaacagtgctggctacgttcagaccaaaaatagaacagcaccggagtggtcatcgactgttcaagaacctgttgcaggttagattcgttaatgttgacaatattttctacggacatggagtcgctctctgttgtcgatattttctttgacatgggggcttaagcgcgcgcttcaactcacccctgcaatattttgtccatcacgcgccccggcagcaggcgcttaagcaccattaccgcccaggtcaccagcgtcaccggatagcgcatcttcggcttctcgctaataaaagcatggcgtactttgtccaccaccgcttccggtcccaacgtaaagcgggcggcgatgccgggattttcgactggtttatcactttgcgtctggttgacgttgtcggtgaagcgagtacgaatgggaccgggttcgatcaggctgactttaattccgctgtggcgcagctccatgcgcagtgcgtctgaccacgcctccagcgcatatttactggccgcgtaagcgccacgacccggcgtggagattaatcccatcaccgatgatgtcatcacaatacgcccttcaccgtgcggtaacatcgcgggtaacaggcgcatggtgagctggtgtgcgccgaaaaagttggcggaaaactgctgttccatctgcgcacggctgatggtggaaagggggccatacatgccgaatccggcattgttaaagatcccatacagacaattatcggtcagggcgatcacctcgtcggctgcgcgatcaacactttctggtgaatccagatcgatcaacacgccggtaaatcccatgctgttcatgcgctcaacatcatccggtttccggcaacctgccagcacatgaaaaccctggcgttttaattcgagcgcgctttccaggccaattccactggaacatccggtaattaagaccgatttttgcataactttacctgtcaggatctccgttgctttatgagtcatgatttactaaaggctgcaactgcttcgccatccagtcggcaataaacggctgggcgtcgcggttgggatgaataccgtcatcctgcatccattgtggcttgaggtagacctcttccataaaaaagggcagcagcggaacatcaaactctttggcgagtttggggtaaatggcgctaaaggcttcattataacggcgaccatagtttgcaggcagacgtatttgcattaacaatggttcagcgttggcggctttgacatcctgcaaaatctggcgcagcgtttgctcggtttgctgtggctgaaaaccacgcaaaccgtcattgccgcccagttcaaccagcacccaacgcggctgatgctgtttcagcagagccggaaggcgcgccagtccttgttgcgaggtgtcgccgctgatgctggcattaactaccgacgttttactctgccacttatcattcaacaaggcaggccaggccgcgctggcagacattcgatacccggcgctcaggctatcacccagaatcaataacgtgtccgctgcggcggcacggaaggttaacaggaccaggaacaggaagggcaaatgccagcggaaaacattgttgaagttcatcatcttaagaagtccgtcggtcagggggagcatgaactctccatcctcaccggagttgagctggttgtcaaacgtggcgagaccatcgcactggtgggcgagtcgggatcgggtaagtcaaccttgctggcgatcctcgccgggcttgatgacggcagcagtggcgaagtgagtctggtgggacaaccgctacataatatggacgaagaagcgcgggcaaagttgcgcgcgaagcacgtcggctttgtttttcagtcatttatgttaattcctacccttaacgcgctggaaaacgtcgagcttccggctctgctgcgcggtgagagtagcgcggaaagtcgtaacggggcgaaagcgttgctcgaacagttagggctgggtaaacgtctggatcatcttccggcacagctttccggcggtgaacagcaacgagtggcgctggcacgagcctttaatggtcgacctgatgtgctgtttgccgacgaacccaccggcaaccttgaccgccagacgggcgataaaattgccgacctgctgttttccctcaaccgtgaacatggcaccacgttgattatggtgacccacgacctgcaactggcggcacgctgcgaccgctgcttacggctggtgaacgggcagttgcaggaggaagcatgattgcacgttggttctggcgcgaatggcgttcgccgtcgctattaattgtctggctggcgctaagcctggcggtggcctgcgtgctggcgctgggcaatatcagcgatcgcatggagaagggcttaagccagcaaagccgtgagtttatggcgggcgatcgggcgttgcgcagttcacgcgaagtgccgcaagcgtggctggaggaagcgcaaaagcgcggcctgaaagtcggcaagcagctgactttcgccacaatgacctttgcaggcgacacaccgcagctggcgaacgtcaaagcggtggatgatatctacccgatgtatggcgatctgcaaactaatccccctggcctgaaaccgcaggcgggcagcgtattgctggccccacgcctgatggcactgcttaacctgaaaacgggcgacaccattgacgtgggcgatgccaccttgcggattgccggagaagtgattcaggaaccggattccggttttaaccccttccagatggctccgcgtctgatgatgaatctggcggatgtcgataaaaccggagccgtgcagccggggagtcgggtcacctggcgttataaattcggcggcaacgagaaccagctcgacggctatgagaaatggttgttacctcagcttaaacccgaacaacgctggtacggtctggaacaggacgaaggcgcgctggggcgatcgatggaacgctcgcaacagttcctgctgctttcggcgcttctgaccttgctgctggcagtggcagcggtggcggtagcgatgaatcattactgtcgcagtcgctacgatctggtggcgatcctcaaaacgctgggggcagggcgagcgcaactgcgtaagctaatcgtcggtcagtggttgatggtgctgacgctttcagccgttaccggtggggccataggcctgttgttcgaaaacgtgttgatggtgctgctcaagcccgttctgcctgctgcactaccgccagccagcctctggccgtggctgtgggcgcttggcaccatgacggtcatctcgctgctggtggggctacgaccatatcgcttgttgctggcaacgcagcctttacgcgtattacgtaatgatgtggtagcgaacgtctggccgctgaagttttatctgccgattgtcagtgtggtggttgtgctgctgctcgccggattaatgggtggcagcatgctgctttgggcggtgctggcgggcgcggtagtactggctttgctgtgcggtgtgctgggctggatgctgctgaatgtacttcgccgcatgacgctgaaatcgctgcctctgcgcctggcggttagccgcctgttacgtcagccgtggtcaacgttaagtcagctttcggcattttcgctctcctttatgctgctggcactgctgctggtgttgcgtggcgatctgctcgaccgctggcagcagcagctacctccagaaagcccgaactactttttaattaacatcgccacagaacaggtagcaccgctaaaagcgttcctcgcggaacatcagatagtcccggaatcgttttatccggtggtgcgggcgcggctgacggcgattaacgataagccgacagaaggtaatgaagatgaggcgcttaaccgcgaactcaatcttacctggcaaaatacgcggcccgatcataatccgattgtcgccggtaactggccgccaaaagccgatgaagtgtcgatggaagaggggctggcgaaacgcttaaacgttgccctcggtgataccgtgacttttatgggcgatacccaggagttccgcgctaaagtgaccagcctgcgcaaagtggactgggaaagtctgcggcctaatttctattttattttccctgaaggggcattagacgggcaaccgcagagctggcttaccagtttccgctgggagaatggcaacggcatgttgacacaactcaaccgccagttcccgaccattagcctgttagatattggcgcgattttaaaacaggtcggtcaggtgctggagcaggtaagtcgggcgctggaagtgatggtggtactggtcaccgcctgcggtatgttgctgttgctggcacaggtgcaggtgggaatgcgtcagcgtcatcaggagctggtggtgtggcgcacactcggtgcggggaaaaaactgctgcgtaccacgttgtggtgtgagttcgccatgcttgggtttgtttctggcctggtggccgcaattggtgcggaaacggcgctggcagtgttgcaggcgaaagtgtttgattttccgtgggagccagactggcgattgtggattgttctgccgtgcagcggagcgctgctgctgtcgcttttcggcggctggctgggtgcgcgactggttaagggtaaggcgctgttcaggcagtttgcggggtgatgagagtaaataaggggcgttctggttgaatggaacgccttgtttaaattaattctacaatatgtttcattgatgatgttattgaattggtgatttcctatctttctattgctgatattaatctgaatcggtggagtttattgattttaaatatagccctacaaaaataactcagactaataaaatcataaatcatatgcgttgaatggatattatccatatagtgaatttgttgatgatgaattcatctgtgctaaaaatgttagtttaataaaatattgaaagtgacctgtaataacagttgttgttgattgagaacaaataagtttatgtgaaaaatatataaatacattagctggtcttgtgtgtcattttatttttttttgttgctaacacagggatatgaacaataactaaaagggcactttatatgagcggaaaaccagcggcgcgtcagggagatatgactcagtatggcggtcccattgtccagggttcggcaggtgtaagaattggcgcgcccaccggcgtggcgtgctcggtgtgtccgggcgggatgacttcgggcaacccggtaaatccgctgctgggggcgaaggtgctgcccggcgagacggaccttgcgctgcccggcccgctgccgttcattctctcccgcacctacagcagctaccggacgaagacgcctgcaccggtgggcgttttcggccccggctggaaagcgccttctgatatccgcttacagctacgtgatgacggactgatactcaacgacaacggcgggcggagcattcactttgagccgctgctgccgggggaggcggtgtacagccgcagtgagtcaatgtggctggtgcgcggtggtaaggcagcacagccggacggccatacgctggcgcggctgtggggggcgctgccgccggatatccggttaagcccgcatctttacctggcgaccaacagcgcacaggggccgtggtggatactggggtggtctgagcgggtgccgggtgctgaggacgtactgccagcgccgctgccgccgtaccgggtgcttaccgggatggcggaccgcttcgggcggacgctgacgtaccggcgtgaggccgccggtgacctggccggggaaatcaccggcgtgacggacggtgccgggcgggagttccgtctggtgctgaccacgcaggcgcagcgtgcggaagaggcccgcacctcttcgctatcttcttctgacagttcccgccctctctcagcctcagcgttccccgacacactgcccggtaccgaatacggccccgacaggggtatccgcctttcggcggtgtggctgatgcacgacccggcatacccggagagcctgcccgctgcgccactggtgcggtacacgtatacggaagccggtgaactgctggcggtatatgaccgcagcaatacgcaggtgcgcgctttcacgtatgacgcgcagcacccgggccggatggtggcgcaccgttacgcgggaaggccggagatgcgctaccgctacgacgatacggggcgggtggtggagcaactgaacccggcagggttaagctaccgctatctttatgagcaggaccgcatcaccgtcaccgacagcctgaaccggcgtgaggtgctgcatacagaaggcggggccgggctgaaacgggtggtgaaaaaagaactggcggacggcagcgtcacgcgcagcgggtatgacgcggcaggaaggctcacggcgcagacggacgcggcgggacggaggacagagtacggtctgaatgtggtgtccggcgatatcacggacatcaccacaccggacgggcgggagacgaaattttactataacgacgggaaccagctgacggcggtggtgtccccggacgggctggagagccgccgggaatatgatgaaccgggcaggctggtatcggagacatcgcgcagcggggagacagtacgctaccgctacgatgacgcgcacagtgagttaccggcgacgacaacggatgcgacgggcagcacccggcagatgacctggagccgctacgggcagttgctggcgttcaccgactgctcgggctaccagacccgttatgaatacgaccgcttcggccagatgacggcggtccaccgcgaggaaggcatcagcctttaccgccgctatgacaaccgtggccggttaacctcggtgaaagacgcacagggccgtgaaacgcggtatgaatacaacgccgcaggcgacctgactgccgttatcaccccggacggcaaccggagcgagacacagtacgatgcgtggggaaaggcggtcagcaccacgcagggcgggctgacgcgcagtatggagtacgatgctgccggacgtgtcatcagcctgaccaacgagaacggcagccacagcgtcttcagttacgatgcgctggaccggctggtacagcagggcggctttgacgggcggacgcaacgttatcattatgacctgaccggaaaactcacacagagtgaggatgagggacttgtcatcctctggtactacgatgaatcggaccgtatcactcaccgcacggtgaacggcgaaccggcagagcagtggcagtatgatggccacggctggctgacagacatcagccacctgagcgaaggccaccgtgttgccgtccactatggctatgacgataaaggccgcctgaccggcgaatgccagacggtggagaacccggagacgggggaactgctgtggcagcatgagacgaaacacgcatacaacgagcaggggctggcaaaccgcgtcacgccggacagcctgccgccggtggagtggctgacgtatggcagcggttacctggcgggaatgaagctgggcgggacgccgctggtcgagtatacgcgggacaggctgcaccgtgagacggtgcgcagcttcggcagcatggcaggcagtaatgccgcatacgaactgaccagcacatacacccccgcaggccagttacagagccagcacctgaacagcctggtatatgaccgtgactacgggtggagtgacaacggcgacctggtgcgcatcagcggcccgcgacagacgcgggaatacggctacagcgccacgggcaggctggagagtgtgcgcaccctcgcaccagacctggacatccgcatcccgtatgccacggacccggcgggcaaccggctgccggacccggagctgcacccggacagtacactcacagtgtggccggataaccgcatcgcggaggatgcgcactatgtctaccgccacgatgaatacggcaggctgacggagaagacggaccgcatcccggcgggtgtgatacggacggacgacgagcggacccaccactaccactacgacagccagcaccgcctggtgttctacacgcggatacagcatggcgagccactggtcgagagccgctacctctacgacccgctgggacggcgaatggcaaaacgggtctggcggcgggagcgtgacctgacggggtggatgtcgctgtcgcgtaaaccggaggtgacgtggtatggctgggacggagacaggctgacgacggtgcagactgacaccacacgtatccagacggtatacgagccgggaagcttcacgccgctcatccgggtcgagacagagaacggcgagcgggaaaaagcgcagcggcgcagcctggcagagacgctccagcaggaagggagtgagaacggccacggcgtggtgttcccggctgaactggtgcggctgctggacaggctggaggaagaaatccgggcagaccgcgtgagcagtgaaagccgggcgtggcttgcgcagtgcgggctgacggtggagcaactggccagacaggtggagccggaatacacaccggcgcgaaaagttcatttttaccactgcgaccaccggggcctgccgctggcgctcatcagcgaagacggcaatacggcgtggcgcggggagtatgatgaatggggcaaccagcttaatgaggagaacccgcatcatgtgtatcagccgtaccgtctgccagggcagcagcatgatgaggaatcagggctgtactataaccgtcaccggtactacgatccgttgcaggggcggtatattactcaggacccgatggggttgaaagggggatggaatttatatcagtatcctttaaatccactacaacaaattgaccctatgggattattgcagacttgggatgatgccagatctggagcatgtacggggggagtttgtggtgttctttcacgtataataggaccaagtaaatttgatagtactgcagatgctgcgttagatgctttgaaagaaacgcagaatagatctctatgtaatgatatggaatactctggtattgtctgtaaagatactaatggaaaatattttgcatctaaggcagaaactgataatttaagaaaggagtcatatcctctgaaaagaaaatgtcccacaggtatagatagagttgctgcttatcatactcactgtgcagatagtcatggcgattatgttgatgaatttttttcaagtagcgataaaaatcttgtaagaagtaaagataataatcttgaagtattttatctcgcaacacctgatggacgatttgaggcgcttaataataaaggagaatatatttttatcagaaatagtgtcccgggattgagttcagtatgcataccgtatcatgattaattttagtgcttttattagtggggcctataaggagattcaatgaaatatagttcaatattttcgatgctttcattttttatactatttgcctgtaatgagacagctgtttacggttctgatgaaaacattatttttatgaggtatgtggaaaaattacatttagataaatactctgttaaaaatacggtaaaaactgaaacaatggcgatacaattagctgaaatatatgttaggtatcgctatggcgaacggattgcagaagaagaaaaaccatatttaattacggaactaccagatagttgggttgttgagggagcaaagttaccttatgaagttgcgggtggtgtatttattatagaaattaataagaaaaatggatgtgttttgaatttcctacatagtaaataatgctggcgctgatggatgcggatggaaacattgcgtggagcggggagtatgatgagtggggcaaccagctgaatgaagagaacccgcatcacctgcaccagccgtaccggctgccggggcagcagtatgataaggagtcggggctgtactacaaccggaaccggtactacgatccgttgcaggggcggtatatcactcaggacccgatagggctggaggggggatggagtctgtatgcgtatccgctgaatccggtgaatggtattgatccattagggttaagtcccgcagatgtagcgctaataagaagaaaagatcaactaaaccatcaaagagcatgggatatattatctgatacttatgaagatatgaagagattaaatttaggtgggactgatcaatttttccattgtatggcattttgtcgagtgtctaaattaaatgacgctggtgttagccgatcggcgaaagggctgggttatgaaaaagagattagagattacgggttaaatctgttcggtatgtacggcagaaaagtaaagctatcccattctgaaatgattgaagataataaaaaagacttggctgtaaatgaccatgggttgacatgtccatcaacaacagattgctcagatagatgtagtgattatattaatccagagcataaaaaaacgataaaggctttacaagatgctggctatctcaagtaatctatcaaagatgataatatttatttttgctattataatcattgttgttttatgcgtaattacttatctttatttatacaaagatgaatctcttgtaagtaaacattacataaactatatggcaataccagaaaatgatggagtttttacatggctcccagatttttttccgcacgtagcggtggatatatcaatatacacaaatgtagaagatgattatttttttcttatttttccctaacaaatgatgatgggggtaggtttaagaaaacattgacagtgagggccagggaacaagtggcgaaaatcgtatcaaagaatgatccagatacaaaaaaagtgtggtgtaaatatggtaagataccagggcaaggggatggtgtaaaccttttttttgttggtgaaattaatgttacgcattattttataacaaatattggagctggattgcctgatgcttgtgcagagtaattgcttgaattaagagtctatcccatatcgaagtcgtcaacttcgtagtgaggaaaagtaaaattcctgactgagaaaagacatgtcggctattgtgtaaagccatatagctcagacgatgaatatctactcgtattcagttgtttattgagggtgagttccgaccctgaaacaacaaataaaatgaacagtcagagagtttacatagaattgcactggtcttttacgatatctgacattgtgtaatacatattcagccatgcattaattaaaatgttacgtgtttaatgtgagtccctatctgaaaataaataatccttccggattaaaataaattcttgccgggaaagaaagaggaaataaaccattagcggaaaaccagcggcacgccagggtgacatgccccagtacggcggcccgatagtccagggttcagcgggggtactgatagtcgcgccgactgcatcgagaactccatacaactttttacggaacgtcacctgataaaatttgttcagtatcgtcttttgagattctcaaggttatggagtaaccagacagaacggacaccactgtcggagataaaaaccccctgtttacgcagctcgttgctggcccggtgctgaccatgtgtcgggaaagcgacggcgtaatcaacaacagcctgttcagttgcctcatcggtacggttcttaaggttaggagcgcggcgactacgattaatctgcgcatccacaccgccttcagcgaccagttcgcggtaacgataaaacgtatcacgcgaaacgcccatgattttacaggcttttgatacgttgctgagttcttcagccagattgagcaaaccggctttgtgtttgatgacgggattggcagtatgaagcatgagagttacctcttgttttggataaggattcgacactcatatcaaaaccggtaactctcaacctttcaaggccatgtgtcagatcaagtcgcgactaatacaaatacgtccctcattaccgcgccttaacccattccgccacttccgcccactcaccgcgaaagacaactttttccgcttttttctcaagctgatagcgatacatcgggtcgtaatattcttcaagtaacggcaccagccaggccagatgaccgtcggtgctgccggtggtgagttgcgttgtcagtgctgcatccagccttgcagccagttcgttatagcgctgtagccccagccgacgcttaatcgccgaaagtccgtgatgcaggtattcgcaatactcctgccagccctgttcgtcgccgtacgcgtgggtaaaatcatgatgcatacgcaagaaatactcttcgttcaggcgctcaagacggatctcaaacggatcttctaccaccgcaatcgccgcctgagtcattcgctcgcgcagacattccggcaggtgattcgaaccgatcatccggctttcgtcttccagcacccacaggcgcaaattctgacgggcgtcggtttttagcatttcggcagccagcaggttttcaaaactcgcctggctaagttgtggttgtaaggtgcgaccaaacgccgaaccgcgatgacgcgccaacccttccagatcaacaccgttcggctgttgctgcactaacagcgttttgccgcagccggtacaaccgccaatcagcactatcggtttttgtgacagttcaatggtcgcctgaatcgcagtctggcgcagtaccttataaccgccttccaccagcggataattaatccccacttcatgcaaccagcgttgcacaatatgtgaacgttgaccgccacgggcgcagcagagaataccttgcggattttgcaggcacgctgcccgccaggcgtccatgcgctgctgacgaatttcacccgccaccagtttatgtcccagcgccagcgctgcgtctgagccttgctgtttatagcaggtgccaacggcggcgcgttcatcgttattcattaacggcagattgatagcggcgggcattgcgccgtgctcaaactcgataggggcgcgaacatcaataatgggcgtatcagcaatcagcagggcacgatagtcctgttccgtgtgtctctcttgcatagttaaaagtgaacctcaaatcagcttgcgcgctattttacgcgccaacgcgcaaggaaacttgatttttaactgcgtgggttgccgaaaatttctaaaaatccgctgatttccggcctgcgctgggtaaacaaggtcacaatatcttctaccgctttgccgctgccaaatttgcgccatgccagactcaatggcgaaggagggcgcatcgttgggattacccggctgaccagttgttgattatcgatcattgactggcaaagcgattttggcaaaaaaccaatgccaacgcccgccagatgggcggcgattttcgtttccatatcgggaacaataatctctttttgccctggcaatcgccaggcgacgcgtttggttaaggtgcgggcgctgtcttcaatattgaccgccggaaagcgccgcaactgcgcttctgttagcggctcttcaacgttcgccagcggatgatccgccgccatgacaaagcgccattgcaccgatcctaagggatcaagactaaaggtatttgccagcgcctcagttcccgtgacgccgatagccagcgaaaaaccttcgtacaatagcgagtcccagacgcccatatagatttgtcgggagatgtgaaactgggtaaaggggtaacgctcattcagccacgccagcaactgggcgacggcctgggggttgtagagcaggttgttgatgacaatattcacctggcgttccacgccatcattcacctgttgcagctcgcttggcatactttccagccagctcagccagtctctggcctgggaaagtagatgctcgccagccgctgtcaacgtcacgctgcgagtcgtacggaaaaacagcgctactccggtattctcttccagaagtttaatgcgataactgatcgtcgccgtggttttacataatcgttctgccgcttttgaaaaacttcctgtttcagcaaccgcaatgaaagtccgcaaggtttctggatcgaacatcttcaggtatccccttttaaatccgcaagttgcgtgattttcttatcctctgatttatcagtatttttacatgataaccctgttcaatttgtggactaaatctagttttggaaaaatattccaacttttgtattgatgttgttctcttaaggttttagattgcctgttattgaaaccaagctgaccggtcggcggtggttgaacggaattatgttacaaggacaaaaagatgaaacttcaggtattaccgttaagtcaggaagcctttagtgcttatggcgacgtaatcgaaacgcagcaacgggattttttccatattaacaatggcctggtggagcgttaccacgatttggcgctggttgagattcttgagcaagaccgtacgcttatcagcattaaccgcgcgcaaccggcgaatctgccgctgaccattcacgaactcgaacgtcatccgctgggtactcaggcctttatcccgatgaaaggtgaggtgtttgtggtggtcgtggcgttaggtgacgacaaaccagacctgtcaacgctgcgggcgtttatcaccaacggcgaacagggagtgaattaccatcgtaacgtctggcatcacccacttttcgcctggcagcgcgtcaccgattttctgaccatcgatcgcggcggcagtgacaactgtgatgttgaaagtattcctgaacaggaactctgttttgcgtgacgcctgcaaccgacttgcataagataaactaattgttcattgtttatgctcacttgtaggtcggagttaacgtaggtatgacggaagttagacggcgcggcaggccaggacaggcggagcctgtggcacagaagggcgcacaggcgttagagcggggaattgcgattctgcaatatttggaaaaaagtgggggaagttcgtcggttagcgatatttctctcaatctggatttgccgctctccacgacctttcgcttgctgaaggttttacaggcagcggattttgtctatcaggacagtcaattaggctggtggcatataggattaggtgtctttaacgtcggtgcggcgtacatccataaccgcgatgtcctctccgtcgccgggccgtttatgcgccgcctgatgttactttccggcgaaacggtcaatgtcgcgatccgtaacggcaatgaagcggtattaattggtcagttagagtgtaaatcgatggtcaggatgtgtgcgccactgggcagtcgtctgccactgcatgcttccggtgcgggcaaagcgctgctttatccgctggcggaagaggagttgatgagcatcattctgcaaaccggtttgcagcagtttacgccaactacgcttgtggatatgcccaccttgctgaaggacctggaacaagcgcgtgaactgggctataccgtagataaagaagagcatgttgtaggtctgaattgcatagcttcagcaatttacgatgatgtcggtagtgttgttgccgctatctccatctccgggccttcatcaagactgacagaagatcgttttgtcagtcagggtgagctggtcagagacaccgcccgcgatatcagcacggcgttgggactgaaagcacatccataatgtctgtcgcatcccgctctgcggagcgggtttttttgacaaaatttgaaagttggaaaaattttccaataaatagaggtaggaataaaatggcaaaaatgagagccgttgacgcggcaatgtatgtgctggagaaagaaggtatcactaccgccttcggtgttccgggagctgcaatcaatccgttctactcagcgatgcgtaagcacggcggtattcgtcacattctggcgcgtcatgtggaaggtgcttcgcacatggcggaaggttatacccgcgcaacggcagggaatatcggcgtatgtctggggacttccggtcctgcgggcacggacatgatcaccgcgctctattccgcttctgctgattccattcctattctgtgcattaccggccaggcaccgcgcgcccgtctgcataaagaagattttcaggccgtagatattgaagcaattgctaaaccggtcagcaaaatggcggttacagttcgtgaagcggcgctggtgcctcgcgtgctgcaacaggcatttcacctgatgcgttctggtcgtccgggtccggtactggtggatttaccgttcgacgttcaggttgcggaaatcgagtttgatcctgacatgtacgaaccgctgccggtctacaaacctgctgccagccgtatgcagatcgaaaaagctgtagaaatgttaatccaggccgaacgtccggtgattgttgccgggggcggggtaattaatgctgacgcagctgcactgttacaacagtttgctgaactgaccagcgttccggtgatcccaacgctaatgggctggggctgtatcccggacgatcatgaactgatggccgggatggtgggtctgcaaaccgcgcatcgttacggtaacgcaacgctgctggcgtctgacatggtgtttggtatcggtaaccgttttgctaaccgtcataccggctcggtagagaaatacaccgaagggcgcaaaatcgttcatattgatattgagccgacgcaaattggtcgcgtgctgtgtccggatctcggtattgtctctgatgctaaagcggcgctgacactgctggttgaagtggcgcaggagatgcaaaaagcgggtcgtctgccgtgtcgtaaagaatgggtcgccgactgccagcagcgtaaacgcactttgctgcgcaaaacccacttcgacaacgtgccggtgaaaccgcagcgcgtgtatgaagagatgaacaaagcctttggtcgcgatgtttgttatgtcaccaccattggtctgtcacaaatcgctgcggcacaaatgctgcatgtctttaaagaccgccactggatcaactgtggtcaggctggtccgttaggctggacgattccggctgcgctaggggtttgtgccgctgatccgaaacgcaatgtggtggcgatttctggcgactttgacttccagttcctgattgaagagttagctgttggcgcgcagttcaacattccgtacatccatgtgctggtcaacaacgcttatctggggctgattcgtcagtcacaacgcgcttttgacatggactactgcgtgcaactcgctttcgagaatatcaactccagtgaagtgaatggctacggtgttgaccacgtaaaagtagcggaaggtttaggttgtaaagctattcgcgtcttcaaaccggaagatattgcgccagcctttgaacaggcgaaagccttaatggcgcaatatcgggtaccggtagtcgtggaagttattctcgagcgtgtgaccaatatttcgatgggcagcgaactggataacgtcatggaatttgaagatatcgccgataacgcagcggacgcaccgactgaaacctgcttcatgcactatgaataagggagataaataatgttacgtttctctgctaatttatcgatgttatttggagaatatgattttctcgcccgttttgagaaagctgcgcagtgtggttttcgcggcgttgaatttatgtttccttatgactacgacattgaagaattaaaacatgtgctggcgagtaataaactcgaacatacgctgcacaatttaccggcgggtgactgggcggcgggggagcgcggtattgcctgtattcctggccgtgaagaagagtttcgggatggcgtagcagcagcgattcgttatgcccgtgcgctgggtaataaaaaaattaactgtctggtcggtaaaacgccggctggtttcagcagtgaacagattcacgcaacgcttgtagaaaacctgcgttatgccgcgaatatgctgatgaaagaagatattttattactgattgaacctattaaccattttgatattcctggtttccatctcaccggaactcggcaggcgctgaaattgattgatgatgttggttgctgcaatttgaaaattcagtatgacatttatcatatgcagcggatggaaggtgaattaaccaacaccatgactcagtgggctgataaaattggtcacctgcaaattgccgataatccgcatcgcggcgaaccgggaaccggagaaattaattatgattatctctttaaggtaatcgaaaattctgactacaacggttgggttgggtgtgaatataaaccccaaaccaccacggaagccggtttacgctggatggatccgtaccgttaaaacgtaacgctattcagacaatgcttttttaggccgctaagttggcaggggatcgtgttgtctgaattcaggaaaagcgaaatttaaaagaggttaattatgaaactgggatttattggcttaggcattatgggtacaccgatggccattaatctggcgcgtgccggtcatcaattacatgtcacgaccattggaccggttgctgatgaattactgtcactgggtgccgtcagtgttgaaactgctcgccaggtaacggaagcatcggacatcatttttattatggtgccggacacacctcaggttgaagaagttctgttcggtgaaaatggttgtaccaaagcctcgctgaagggcaaaaccattgttgatatgagctccatttccccgattgaaactaagcgtttcgctcgtcaggtgaatgaactgggcggcgattatctcgatgcgccagtctccggcggtgaaatcggtgcgcgtgaagggacgttgtcgattatggttggcggtgatgaagcggtatttgaacgtgttaaaccgctgtttgaactgctcggtaaaaatatcaccctcgtgggcggtaacggcgatggtcaaacctgcaaagtggcaaatcagattatcgtggcgctcaatattgaagcggtttctgaagccctgctatttgcttcaaaagccggtgcggacccggtacgtgtgcgccaggcgctgatgggcggctttgcttcctcacgtattctggaagttcatggcgagcgtatgattaaacgcacctttaatccgggcttcaaaatcgctctgcaccagaaagatctcaacctggcactgcaaagtgcgaaagcacttgcgctgaacctgccaaacactgcgacctgccaggagttatttaatacctgtgcggcaaacggtggcagccagttggatcactctgcgttagtgcaggcgctggaattaatggctaaccataaactggcctgatacccgcaataaaaatggccgatatcagaaaatgaatcggccagcaatattaaaaaagaaagcagccaaagatgttgcttcagtattaaaaataatatttttattttatttgttcctcatagctagattaaaacaacgttattcgatacgtgaaattaagagggatttatggaacatcagagaaaactattccagcaacgcggctatagcgaagatctattgccgaaaacgcaaagccagcggacctggaaaacatttaactattttaccttatggatgggttcggttcataacgttcccaattatgtgatggtcggcggcttttttattctcggcttgtctacctttagtattatgctggcaattatcctcagcgcctttttcattgccgcggtaatggtattaaacggtgctgcgggcagtaaatacggtgtgccttttgccatgatcctgcgtgcttcttacggtgtacgtggtgcactgtttcccggattattaaggggcggaattgccgccatcatgtggtttggtttgcaatgttacgcggggtcactggcctgcttgattctgattggcaaaatctggccgggatttttaactctcggtggtgatttcactctgttaggcctttctctaccgggcttaattactttcttaatcttctggctggtcaacgttggtataggttttggcggtggcaaagttttaaataaattcactgccattcttaacccgtgcatctatatcgttttcggcggtatggcgatttgggcgatttcactggtcgggatcggtccaatctttgactacattccgagcggtattcagaaagcagaaaacggtggcttcctgttcctggtggtgattaacgcggtagttgcggtctgggcggcaccggcggtgagcgcatccgactttacgcaaaacgcccactcgtttcgtgagcaggcgctggggcaaacgctgggtttagttgtggcctatattctgtttgcggtcgccggggtatgtattattgccggagccagtattcactacggcgctgatacctggaacgtgctggatattgttcagcgttgggacagcctgttcgcctcgttctttgcggtactggttattctgatgacaactatctccactaacgcgaccggtaatattattccagccggttatcagattgccaccattgcaccgacaaaactgacctataaaaacggcgtactgattgccagtattatcagcttgctgatctgcccgtggaaattaatggaaaatcaggacagcatttatcttttcctcgatattatcggcggaatgcttggtccggtaattggtgtcatgatggcgcattattttgtggtgatgcgcggacaaattaatcttgatgaactgtataccgcacctggcgattataaatattacgatcacggttttaacctcactgcgttttcagtaactctggtggccgttattttatctcttggcggtaagtttattcactttatggaaccgttatcgcgtgtttcatggtttgtcggcgtcatcgtcgcctttgcggcctacgccttattaaagaaacgtacaacagcagaaaaaacaggagagcaaaaaaccataggttaattaatcccgatattgaacattgagttaaaaaccaatctgtattttacaaggagtttgttatgtcttttgatttaatcattaaaaacggcaccgttattttagaaaacgaagctcgcgttgtagatatcgccgttaaaggcggaaaaattgctgctatcggtcaggatctgggcgatgcaaaagaagttatggatgcgtctggtctggtggtttcgccgggcatggttgatgcgcacacccatatttctgaaccgggtcgtagccactgggaaggttatgaaaccggtactcgcgcagcggcaaaaggtggtatcaccaccatgatcgaaatgccgctcaaccagctgcctgcaacggttgaccgcgcttcaattgaactgaagttcgatgccgctaaaggcaagctgactattgatgcggcacaactcggtggcctggtgtcttacaacatcgaccggctgcatgagctggatgaagtgggcgttgtcggcttcaaatgcttcgttgcgacctgtggcgatcgcggtatcgacaacgacttccgtgatgtaaacgactggcagttcttcaaaggtgcgcagaagctgggcgaactgggtcagccggtgctggtgcactgcgaaaacgcgctgatttgtgacgaactgggcgaagaagcgaagcgtgaaggtcgcgtaaccgctcatgactatgtggcttcgcgtccggtatttaccgaagtggaagcaattcgccgcgtactgtatctggcgaaagttgctggttgccgtctgcacgtttgccacgtcagcagcccggaaggtgttgaggaagtgactcgtgcacgtcaggaaggtcaggacgttacttgtgaatcctgcccgcattactttgtactggataccgatcagttcgaagaaatcggtactctggcgaagtgttcaccgccgatccgcgatctggaaaaccagaaaggcatgtgggaaaaactgtttaacggtgaaatcgactgcctggtttccgaccactctccatgcccgccggaaatgaaagccggtaacatcatgaaagcatggggcggtatcgccggtctgcaaagctgcatggacgtgatgttcgatgaagcggtacagaaacgcggtatgtctctgccaatgttcggcaaattaatggcgactaacgcagcagatattttcggtctgcagcaaaaaggccgtatcgccccaggaaaagatgccgacttcgtcttcattcagccgaatagcagctatgttcttaccaatgacgatctggaatatcgccacaaagtcagcccgtatgttggccgtaccattggcgcgcgtatcacgaaaaccatcttacgtggtaatgtgatttacgacattgaacagggcttccctgttgcgccgaaaggtcaatttatccttaaacatcagcagtaatctggcccctgcaatgcccgtccttgcggcgggcattctccggttaaggtgtgtttatgttcaattttgcagtcagccgcgaaagcctgttatcaggatttcagtggtttttctttattttttgcaacacggttgtggttcctcctacgctactttctgcttttcagttgccgcaaagtagcctgcttacgctcacgcaatatgcttttcttgctaccgcactggcctgcttcgctcaggcgttctgcggtcatcgtcgcgctattatggaagggccgggtggcctgtggtggggaaccatccttactatcacccttggcgaagcatcgcgcgggacaccgatcaacgatatcgctaccagtctggcggtggggattgcactctccggcgtgctgacgatgttgattggttttagcggattaggccatcgcctggcacggttatttacgccgtcggtgatggtcttgtttatgttgatgctgggcgcgcagctgaccactatctttttcaaaggtatgctcgggctgccgtttggcatagccgacccaaattttaaaattcagttaccaccgttcgcgctctcggtggcggtgatgtgcctggtactggcgatgattatctttctgccgcaacgttttgcccgttatggcctgctggtcggtacgataaccggctggttgttgtggtacttttgctttccttcttcgcattcgctctccggtgagttgcactggcagtggttcccgctcggcagtggcggtgctttgtcgccgggaattattctgacggcggtgattacaggtctggtgaatatcagcaatacctacggtgcgattcggggcacggatgttttttatccgcagcagggcgcggggaatacgcgttatcgtcgtagctttgtggcgaccggatttatgacgctgataaccgtaccgctggcggtaattccattttcaccgtttgtttcatccattggtttattaacccagactggcgattacacgcggcgttcgtttatttatggcagcgttatttgcctgctggtggcgctggttccggcactcacacgactgttttgcagtatccctttacccgtgagtagcgcggtcatgctggtttcttatctgcctttactcttttccgcgctggtgtttagccagcaaataacctttaccgctcgcaatatttatcgactcgcattgccgttatttgtcggcatatttttaatggcattaccgcctgtgtatctgcaagaccttccattaacgctgcgtcctctgctcagtaacggcttattggtcgggattttactggctgttcttatggataatcttattccgtgggaacgcatcgaataatttgttgaaaaaggattgataatgaagattgtcattgcgccagactcttttaaagagagcttaagtgcagaaaaatgttgccaggcaattaaagccgggttttcgaccctctttcccgatgcgcactatatctgtttgccgatagcggatggcggcgaaggaacggtggatgcgatggtcgccgcgacgggcggcaacatcgtgacgcttgaagtctgcgggccgatgggcgaaacagtgaatgctttttatggccttaccggcgacgggaaaacggcggtgattgagatggcggcagcaagtggcctgatgctggtcgcgcctgaaaagcgtaatccgttgctggcctccagttttggtacgggggagttaattcgtcatgcgctggataacggcattcgccatattattctcggcattggcggcagtgcgacggtcgacggcggtatgggcatggcgcaggcgctcggtgtgcgtttccttgatgccgacggtcaggtgctggtggctaacggcggtaatttagcgcgcgtggcaagcattgagatggatgaatgcgatccgcgtctggcgaattgccatattgaagtagcatgtgacgttgataacccgctggtaggggcacgcggcgcggcggcggtgtttggcccgcaaaaaggggcaacgccggaaatggtcgaagagctggaacaggggctgcaaaattacgcccgtgttttacaacagcaaactgaaatcaacgtctgccagatggcgggcggcggcgctgcgggcggtatgggtattgcggcggcggtatttctcaatgcggatattaaaccaggtattgagattgtgttgaatgcggtcaatcttgcgcaggcagtgcagggcgcagcactggtgattaccggggaagggcgcatcgactcgcaaacggcaggcggtaaagcgccgctgggtgtggcgtcggtggcgaagcagtttaatgtaccggtgattgggattgctggcgtattgggtgatggcgtggaagtggtgcaccagtacggcattgacgcggtattcagcattttgcctcgtctggcacctttagccgaagtgctcgccagcggtgaaaccaatctcttcaacagcgcgcgaaatattgcctgcgccattaaaataggtcagggaattaaaaactgacccttacctttaaagcggatgcgatttatatcgcataagagtgcagtactcatgccggatgcggcatgagtaccatatccttcctgaaaatcgcgcaaattctatatattgcagagatcatgtaggcctgataagcgaagcgcatcaggcaatgttacaaaaaaagccacggtataaaccgtggcaaaatccaacatagctaaaaataatcaggcgagtggtatgacttaaatctctacgtcgcggttgcaatctttcgagtaaatatagctgaacgcttcaccacgccctacgccataaccagcctgtaaagaataagcgcccataaagatgtaatcgccttttttcaccgggatccagctattgtcgaggttataaaccccctgaccggaaagaatataggcaccgtgttcctgaacgtgtgtttcgatataaccgtggctggcacctggtgcaaaagagaggatatgcatgttcatatcaaaacctaactctttgggcagaaaatccagcaggatcacatcatccataccttcatagtgaatgcgttccagttcgctggcattgccagaaaccagccacggtgcatggccttctaccggaacatagcggcgcttatataaaaagatttggctgtcttcggcctgggcgttaacaaacgtcattaaggagcctggcgggcaataaagatagccaccttcgcttaaggcaaatgttttgccttcggctttggcagtgatatttccagagatcacatacaggaacgtttcaatgccttcgccaccgaagccctgttggttgccgccgttttgatgcagtgtgaccagataatcaacaaaagaggcacccagctttggcgtggagaggattgtcgcgtcacaattttcaaagcccggaataatgttttttaccagaccatccggggttaacagtgcgaaattaccgtgtttcacaatcgcacggttagccagtaaatcatcgcggtaaccggtgacgttatttaaatatcccatttatgactccttatttctgccaggcaagttgataaagcatgattgccaacgttttgaccccttcggcaaggtcggtaatattggtgcgttccgccgggttatggctgatcccgttgatgctgggaatgaaaatcatgcaggttggtacgcgaggcgcgaaaatttgcgcgtcatgcccggcaccactgtgcatcacccggtaattcagtttttcactttcacacaattctgtcagggtggcgaccaggtccttattcatcggcacgggttcttcgtccatccataaatcgatatcaataccaatgtccatttcatcgcaaatcgcccgcatgtcgttttctaactgttgggtgaaatcacgcaggatggcggcgtcggtatgacgacaatcaatggtgaacgtggttttacccggcaccacattcaccgtattcgggcgcggctctactttgccaaaggtcagcaccagcgggtcgcccatctttttcgctttttcgatcgactgatggcaaatgcgactgaaagcgtaaaccgtatcacgacgataacccatcggcgtggtgcctgcatggtttgattcgccgttcagcgtcaccgtatagcgacgttgcccgacaattgcattcaccacgccaattgattgcccattactttccagcacacagccctgttcgatatgcagttcgacaaaggctttaatatcctgacgcggagttagtggggcgttcggcagagtaaatccgcaagccttcatcgcatcgacaaaactatttcctttggcatcacagatattccgcacgtcgtcaggattcgccagcccaaagatatttttactgccccagaagacatacgggaagcggctgccttcttcttccgccatcgccaccacttcaagcgtacgtaacggcgcgccgtattgcgttttcaaccagtcaattgccagccacgccgccagcgcgccgaattgcccgtcgaggttaccgccgttaaccacggtatcgatatgcgaaccgctcagaaccacttcctgtggatattcggtgccactcaggcgaccgtataaattccccacttcatcgaaacgtgtttccagcccgcttgctgccattctttttttaaattgctgctgggtttccagccattccggcgaataaagtaaacgggtcatcccacccgctgggtcagcgccaaaagaggaaagccagggcagcgtttcttctatggcttgacgaaaatgtgtaatcataagaaagtcctgtctcaataattattgcgcaaagggatttttcgtttcgtatgacgtgttataaagcgcgtcggaaattaaatactggtaaatatcatcaacaatttcgatgccttcgacggcggctttgcgttgtttaatatcctgatcctgtccgggataataaacctgattaaaaccgggcgcgggggtaatggcatttaattcgcgcatggtctggctaagatgttgacggaataattcgctggaggagaaaaagttcgggttaataactacatgtaattgccccaaattacgcccggcgtgtaaatcgtcatacatcgaactaacctgtcgcccgaacggtaagccgagtaagacgcctgagaggacgtcaatcatcatcatcaggccataccctttcggcccggcggcggggagcagagcatgtaccgcgaacggatcggttgttggtgcaccgtttttatcgaccgcccaggtatccggaatagacatattacgcgagcgggcgtcgagcacttttccccatgcctgtacggtagtcgccatatcaaaggtaaggacctcgtcgccttctcccggcgcggcaaaggccaatgggttagtaccgtagtaaatttccgcgccgccaaacggcaccaccattggatcggactggcacatcgaaatgccaattaatccagcgcgggctgcctgctgcacaaaataagagattgcgccgctgtgacccatccggctgataccgaccaccgcaacgcctttttgctgggcggttttgatggcatgttccatacccattttcgccgcgacctgtccggcggcattgtcggcatgtaaaattgccgagcacggcccggtttcttcaagacgaaactccggttcgcggttggtgccgccttttgaaatgcgttctgcgtagtattcaacgcgcaccgcgccatgagagtggatccctctggcatcggcgtaaaccaatacttcagccacggttgcagcgtgctcacgttttaacccagcctggcagagtttattctcgattagctggtggagtgtttcccgactgattttcatctgtcttcctttttaacgacggtgtgaagcatgactgcaattaacatacagggaaaatatctggattatgtgatccagacaggcaaaaaaatatagttagaatttatttgataatccgctctcttttaacctggtttttaaaacaaccacgcttattaaaaaataacacgtaatagcatggcggttatttgaattcttttgttaataatccctgtgtgatattcatcaccttatttacccgttgtcatcgataccgtaatcgccacattaacactgctcgtgcaattgccatgggtgcaatttttaaggagttgttatgatccacgcctttattaaaaaagggtgttttcaggattcggtcagtttaatgattatttcacgaaaactcagcgaatcagaaaatgttgatgatgtttccgtaatgatgggtacgcccgccaataaagcgttattagataccacaggtttctggcatgacgattttaataacgccacgtcgaacgatatttgcgtgacaattcgtagcgaagcggcggatgcggggatcgcgcaggcgattatgcagcagcttgaagaggcgctaaaacaactggcgcaggggtcaggcagcagccaggccttgacgcaggtgcgtcgctgggacagtgcctgtcagaaattacccgacgccagtctggcgctgatttcagtggctggcgagtatgcggcggagctggcgaaccaggcgctggatcgcaacctcaacgtgatgatgttctccgataacgtcacgctggaagatgaaatccaacttaaaagccgcgcgcgggaaaaaggcttgctggtgatggggccggactgcggtacgtcgatgattgccggcacgccgctggcttttgctaacgtgatgccggaaggcaatattggcgtcattggcgcttccggtaccgggattcaggaactgtgttcgcagattgcgctggcaggggagggaattactcacgcgattggccttggcgggcgcgacctcagccgtgaagtgggcggcatcagtgcgctgacggcgctggaaatgctcagtgcagacgagaaaagcgaagtgctggcatttgtttcaaaaccgcctgccgaagctgtgcgtctgaaaattgttaatgccatgaaagcaaccggcaaaccgacggtggcgctgtttttaggttataccccggcggtggcccgcgacgagaatgtctggtttgcctcctcgctggatgaggccgcacgcctggcttgcctgctttcacgcgtcacggcgcgacgtaacgcaatagcacctgtcagcagcggatttatttgcggtttgtataccggcggtacgctggccgccgaagcggcgggattacttgccgggcaccttggcgtggaagccgacgatacccatcaacatggcatgatgctggacgccgatggccaccagattattgacctcggcgatgatttctacaccgtcgggcgtccccatccgatgatcgacccaaccttacgcaaccagttaattaccgatctcggcgctaaaccgcaagtgcgtgtgctgctgcttgatgtcgtgattggcttcggtgcgaccgccgatcctgccgcctcgctggtaagcgcctggcaaaaagcctgtgctgcgcgttcagacaatcaaccactgtatgccattgccacggtgacaggcactgaacgtgacccgcaatgccgctcgcagcaaatcgccacgctggaagatgcagggatcgcggtagtgagttcgctgccggaagccaccttgctggcggcggcactgattcgtccgctttcgcctgccactcagcaacacacaccgtcattactggaaaacgtcgccgtgattaacatcggattacgcagctttgcgctggagctacaaagcgccagcaaaccggttgtgcattaccaatggtcgccagtcgccggcggcaataaaaaactggctcgtttattagaacgtttgcaataaggggttcccatgtttacatcagtggcgcaagccaatgctgcggttatcgaacaaattcgtcgcgctcgtccacactggctggatgtgcaaccggcttcttcacttatcagcgaactaaacgagggcaaaacactgcttcacgccgggccgccaatgcgctggcaggagatgaccggacccatgaaaggggcgtgcgtgggcgcatgtctgttcgaaggctgggcgaaagatgaagcgcaggcgctggcaatactggagcagggggaagtgaacttcattccttgtcaccatgtgaatgccgtcggtccaatgggcggtattacttctgccagtatgccgatgctggtggttgagaacgtgaccgacggcaaccgggcgtactgcaacctcaacgaaggtatcggcaaagtgatgcgttttggcgcttacggcgaagatgtcctgactcgccatcgctggatgcgcgatgtgttaatgccagtattaagcgcggcgctggggcgcatggagcgcggtatcgatctcacggcgatgatggcgcagggcattacgatgggcgatgagttccatcaacgcaatattgcttcctctgcactgttaatgcgtgcgctggccccacaaattgctcgcctcgatcatgataaacagcacatcgccgaagtgatggatttcctcagcgtgaccgatcagttcttcctcaacctcgcgatggcttactgcaaggcggcgatggatgctggcgcgatgatccgcgcaggcagcatcgtcacggcaatgacccgcaacggcaatatgttcgggattcgggtaagcgggctgggcgaacgctggtttactgcgcctgtaaacactccgcaaggtctgtttttcaccggcttctcgcaggagcaggcgaacccggatatgggcgatagcgcgattaccgaaacctttggtatcggaggtgcggcaatgatcgcagcgcctggcgtaacgcgctttgtcggtgcgggtggcatggaagcggccagagcggtatctgaagagatggcggaaatttaccttgagcgcaatatgcagttgcagatcccaggctgggattttcagggcgcgtgcctgggactggacattcgtcgcgtggtagaaaccggcattacgccactcatcaataccggtatcgcccataaagaggcggggatcgggcagattggcgcaggcactgtgcgggcaccgctggcgtgttttgaacaggcgctggaagcactggctgaaagcatggggattggttgaggaacgcgcaatgacgatcatccatcctctgcttgccagccgtagtgcaccgaattatcgccagtcctggcggttagcgggagtgtggcgacgggcgattaacctgatgacggaaagcggcgaactgttaacgctgcatcgtcagggtagtggtttcggccccggaggatggatgcttcgccgtgcgcaattcgatgcgttatgcggtggattatgcggcaatgaacgaccacaggttgtggctcaagggattcgcctcgggcgtttcacggttaaacagccacagcgttattgtttgctgcgtattacgccgcctgcgcatcctcaaccacttgcagctgcatggatgcaacgcgcggaggaaaccgggcttttcgggccactggcgttggcggcaagcgatccgctgcctgctgagttacgccagtttcgtcactgttttcaggccgcgctcaatggcgttaagaccgactggcggcactggctgggtaaaggccccggattaacgccgagtcatgatgacacgctgagcggaatgctgctggcggcctggtattatggcgctttagatgcgcgctccggtcgccagttttttgcctgttccgacaatctgcaactcgttaccacagcggtgagcgtcagttatttacgttatgccgcgcaaggatatttcgcctcgccactcctgcactttgttcatgctctgagttgcccgaaacgtaccgctgttgcgattgattcgctgctggcgctggggcatacgtcaggggcagatacactgctggggttctggcttggtcaacaattattacaaggaaaaccatgaaaacactggttgtagctcttgggggaaacgccttactccagcgcggtgaggcgctgacggcagaaaatcaatatcgcaatatcgccagtgctgtacccgcgctggcgcgcctggcccgttcttatcggctggcgattgttcacggcaacgggccgcaggtggggctgctggcattgcagaatctggcgtggaaagaggtagaaccgtatccgctggatgtgctggtggcagaaagtcaggggatgattggctatatgctggcgcagagtttgagcgcacagccgcagatgccgcccgtgacgacggtgctgacgcgcattgaggtttcgcctgatgatccggcgtttttgcagccagagaaatttattggtccggtttatcagccagaagaacaagaggcactggaagcggcttacggctggcagatgaaacgtgatggtaaatatttgcgccgggtggtggcgtctccgcaaccgcgtaaaattctcgacagcgaagccatcgagttgttgctcaaagaggggcatgtggtgatttgcagtggcggcggcggtgtgcctgtgacggaagatggggcagggagtgaagcggtgattgataaagatctcgctgctgcgttgctcgctgagcagattaacgccgatgggctggtgatcctcactgatgctgatgcggtatatgaaaactggggaacgccgcagcaacgcgccattcgccatgccacaccggatgagttagcgccatttgccaaagccgatggttcgatggggccgaaggtaacggcggtgagtggttatgtcagaagcggtggtaaacccgcgtggattggggcgttatcgcgaattgaagagacgctggcgggcgaagcggggacctgtatttcgctgtagtcgtaggcattagacatttgtgcctgatgcgacgcttgacgcgtcttatcaggcctacaaccggtgccgcatccggcaattggtgcacaatgcctgatgcgatgcttgacgcatcttatcaggcctacaatgggtaccggatcggtaggccggataaggcgtttacgccgcatccggcaagaatagagcaccagttaaccgaacttactctgcgcccaaatcacgccgctggcatattccggcggcagcagcgggattaaggcttccagcgtcgcagtcagacgcgatgtgtcgctgtcggtcaaattcagatgccccactttacgccccggacggacttctttgtcgtaccagtgcagatgcaccagcggcaatttcagccagtcataattcgcatcgctaccaatcagattgatcatcaccgacggattattcaccactggttgcggtaacggcagatcggtaatcgcccgcagatgcagctcaaactggctgatgctggcaccgttttgtgtccagtgaccgctgttatgcacacgcggtgccagttcgttgatcaacagaccttgcggggtgacaaaacactccatcgccatcacgcccacatagcccagctcctgcataatcgccgaaagcatctcttcggcttgcgcttgctgctgcgcattggcctgcgggaaagcgacgctggtgcgcaaaataccgtcctgatgcaggttatgcgtcagcggataaaacacggtactgccatcaaagccgcgcgcgccaaccagcgacacttcaccagagaagtttatgccctgctcgacaatacattcgccgtagcattcagccggtaactgctcggtttcatcggcgcgtaaacgccattgaccgcgaccgtcatagccaccagtgcgacgcttaacaatcgccagctcacctaaacgatcaaacaccgcaggccactcgctgcgttcggcaagtaactgccacggtgcagtcggcaggtggagcttatcgaaaagctgcttctgagtcagacggtcagcaataatcgggaacacatcgcggttcacaaaggccggatggcgcgccagctcgcgggttaatgcggtttccggccagcgttcgatctcagcggtaatcacgctttgttgaaaaggcaccgccgccggttcagcgtccagcccgactggccagacagcaatgcctaacggttcgcctgcctgacgcagcatacggcctaactgcccgttaccgaggacgcaaacctgtttcatgccgcacctcgcgggtccgggttttccagcacttcgtcggtctgggctttgcgccagtcattcagacgctggtgcagttctttatcatgagtcgcaagaatttgtgctgccagtaacgccgcgtttgccgcgccagctttaccaatcgccagcgtacccaccggaatgccgcgcggcatttgtacgatggagtagaggctatcgacaccgctcagtgcggcgctctgtactggcacgcccagcaccggcaccagcgttttggcggcaatcatgcctggcagatgcgctgcgccgcctgcgcccgcaataatcacctgataaccgttctcttcggcgctttcggcgaagctgaacagtttatcgggggtgcggtgagcagaaaccacttcaacgtggtgcgggacattcaggatttcgaagatttcggcggcgaactgcatggtagcccagtcgcttttggaccccatcacgatggcgacacgcgccggattattgcgggaagacatgcgtcttaaaactcctgtggtgcacaactctcggctttagagggcacagagaatagcacggaaagagagcaaggaaaacggttgcgtggctgtgaaatcagcaaagttgcgggttttttaaaacggaaaatgaatcagctcaacgtcatccgccgtgactttcaccatcgaaccttctgtatgccaggcaccgagtaccacgcgaaaagcaggttgctggttggcgataagttcatgtaccgccgggcgatgggtatgcccgtggatcagccattgcacctgatgtttttccatcgcactgactaccgcgttttggttaacgtccatgatcgccagcgatttactgctgttggcttctttactgttcgctcgcattcgcgcggcaatgcgtttgcgcacaaacaacggcagggcgaggaatagcgtttgcagccagggtttgtggactttggcgcgaaaagcctgataacccgcgtcatcggtgcacagcgtgtcgccatgcataatcaacacccggcgaccataaagttcgagcaccttttcttccggcaataatgtcatgccgctttcacgggcaaagcgtttgccgagcagaaaatcacggttgccatgaatgaaataacagggaacgccggaatcggacaccgctttgatcgctgccgccatctggcgatggagtgggttgggatcgtcgtcgccaatccatgcttcaaacagatcgccaagaatatacagcgcgtcggccttgcgggcttcccccgctaaaaaacgcagaaaaccggcggtgatcgccggttcttccacgcagagatgaagatctgcaataaagagtgtcgccacgattactcgctaacggtcacgctttcaatgataacgtcttcttttggcacgtcctggtgcataccgctacgaccggttgcaacacctttgattttgtctaccacgtccatgccgtcaaccacttcagcaaacacgcagtagccccaaccttgcaggctttcgccagagaagttcaggaagtcgttatcaaccacgttgatgaagaactgtgcagttgcagagtgcggagcctgagtacgtgccattgccagcgtaccacgggtatttttcaggccgttgttggcttcgtttttgatcggttctttggtggctttttgtttcatgcccggttcaaaaccgccgccctgaatcataaagccgttgataacacggtggaaaatggtgttgttgtaaaaaccttcgcggcagtagtccaggaagtttttaactgtttcaggtgctttatcgtcaaaagttttgatgacaatatcgccgtgattggtgtggaaagtaaccatttttgcatcctgttccgtttgattggtgcttcaacccagttcgggtcatatatagggtggtgttatagcataaccgcacgatcggatcatcacgcaatgtatgctgattcgcgcgggaaatatgggtattatacgcaactcaattacccacacatgtctaaacggaatcttcgatgctaaaaatcttcaatactctgacacgccaaaaagaggaatttaagcctattcacgccggggaagtcggcatgtacgtgtgtggaatcaccgtttacgatctctgtcatatcggtcacgggcgtacctttgttgcttttgacgtggttgcgcgctatctgcgtttcctcggctataagctgaagtatgtgcgcaacattaccgatatcgacgacaaaatcatcaaacgcgccaatgaaaatggcgaaagctttgtggcgctggtggatcgcatgatcgccgaaatgcacaaagattttgatgcgttgaacattctgcgcccggatatggagccgcgcgcgacgcaccatatcgcagaaattattgaactcactgaacaactgatcgccaaaggtcacgcttatgtggcggacaacggcgacgtgatgttcgacgtcccgaccgatccaacttatggcgtgctgtcgcgtcaggatctcgaccagctgcaggcaggcgcgcgcgttgacgtggtcgacgacaaacgcaacccaatggacttcgttctgtggaagatgtcgaaagagggcgaaccgagctggccgtctccgtggggcgcgggtcgtcctggctggcacattgaatgttcggcaatgaactgcaagcagctgggtaaccactttgatatccacggcggcggttcagacctgatgttcccgcaccacgaaaacgaaatcgcgcagtccacctgtgcccatgatggtcagtatgtgaactactggatgcactcggggatggtgatggttgaccgcgagaagatgtccaaatcgctgggtaacttctttaccgtgcgcgatgtgctgaaatactacgacgcggaaaccgtgcgttacttcctgatgtcgggccactatcgcagccagttgaactacagcgaagagaacctgaagcaggcgcgtgcggcgctggagcgtctctacactgcgctgcgcggcacagataaaaccgttgcgcctgccggtggcgaagcgtttgaagcgcgctttattgaagcgatggacgacgatttcaacaccccggaagcctattccgtactgtttgatatggcgcgtgaagtaaaccgtctgaaagcagaagatatggcagcggcgaatgcaatggcatctcacctgcgtaaactttccgctgtattgggcctgctggagcaagaaccggaagcgttcctgcaaagcggcgcgcaggcagacgacagcgaagtggctgagattgaagcgttaattcaacagcgtctggatgcccgtaaagcgaaagactgggcggcggcggatgcggcgcgtgatcgtcttaacgagatggggatcgtgctggaagatggcccgcaagggaccacctggcgtcgtaagtaattgcgctattgccggatgcgagttttcgcatccggttatcgtctgcgccaccacaacattcccatcagtagcatccccggcaaccacacccacatcaattcagaaataatcacctgatgcccgtacgctgtggtgtaacgagacaatgcaaacggcgcgactttaatcacctgccagggagcgaaaaagcgttcatctgaccacggccacagccagccaacccctttaccgccagtggttaccgaatccagcaagctgtgcgatagcaacgagacggttaaaaacagccagcagcgaatcagcccagccctgaaccatcgacgtccaatcagcacacataacagcgggacaacaaacgcaaacaccagcgaatgggtaaacccgcgatgaccaaaaacattgccgtaagcaacgccaaaattaaacgacaagacgtcggcatcgggcagcatcgccaggatgattccggcaaataacaggcgcggagggatgactttcgaacccaaccctaaaccaatgcataggggaacggcggcgtgcgtaataacggttggcatgatggtcgcttcggcaaaatgtcgatgctatcagcatggatgaacggggcgtagagggcaaaagtctgaaaagagaaccggcctgttgatacaggccgggaaagggatcaggcaacaacctgtacgctgtgacctgcaaaactcactgtctgaccggcgacgattttgcagcgtttgcgcgtttcaaccgcaccgtcgactttcacctggccttcggcaatcgcgattttcgcctgcgcgccgctttcgctccagccttccagtttcagcaagtcgcacagctcaacgtgcggatgtttacctaaagaaaatgtcgccatgttactcatcctgtggatcatgatattcaacgcacgcctgtagcgtgttttcaatcagcgtggcaaccgtcatcgggccaacgccgccgggaacaggcgtaatgtatgaggcgcgtttagccgcgtcttcaaacacgacgtcgcccacaactttgccattttccagacggttgatgccgacatcaatcacaattgcgccttctttgatccagtcaccgggaataaagcctggcttgccaacggcaacgatcaatagatcggcattttctacgtgatgacgcagatttttagtgaagcggtgagtcactgtagtggtgcaacctgccagcagcagttccatgctcatcgggcggccaacgatattcgatgcgccaatcaccacggcgttgaggccgaaggtatcaatgttgtaacgctcaagcagcgtgacgataccgcgcggggtgcagggacgcagacgcggcgcgcgctggcacagacgaccgacgttgtaaggatggaaaccgtccacgtctttgtccggatgaatacgttccagcactttgacgttatcaatacccgccggtaacggcagttgaaccagaatgccatcgatggtgttgtcggcattcagcgtatcgataagctccagcagctccgcttcgctggtggtttccgggaggtcataagagcgggagacgaacccgacttcttcacaagccttgcgtttgcttgcgacataaatttgcgatgcagggttactacccaccagcacaacggccagtcctggtgcccgcagtccggctgcaatacgcgcctgaactttttgagcaacttcagagcgcacctgctgcgcaatcgttttaccgtcaataatctttgctgccatcagagagaggattccatctgttacgtaggtcgaaggggatgcgcctattttgtcagaagcggggcgcgctgtcaggtttcgtttcagatttatcgcgtgaagcgacctcttgcgaaggtgaggcgcaccgtcgctgagactgaaagcttcatttttcgtccatgatggcgttgtaaatctggaactgatttatttccttgtctaaggattaagataatttaagaaatacctgacaatataaaaagaattttcagcctggtaatttaccgcttcaggtctatatttgtgttgaatatattatgcgcggaagtattcatctaacggggctctctattttttagaatagagtgcatattttcaattaagacattcttagaggataaaaaggaatttactactatcagtgtcttaaataaagtaatcggttatatacggatgtggagtcgataaatgagattgaaggaatatatatgaaattaagatttatttcgtctgcgctggctgccgcactattcgccgctacgggtagttatgctgccgttgtagatggcggtacaattcactttgaaggcgaactggtgaatgctgcctgttcagtgaatactgactcggcagaccaggttgtcacactcggtcaatatcgtaccgatattttcaatgctgttggtaatacctctgcattaattccattcaccattcagttgaacgactgcgatcctgttgttgccgctaatgctgccgttgcattttctggtcaggctgatgcaatcaatgataatttattggccattgcatccagtaccaatacaacaacagcaacgggtgtcggtattgaaatacttgataatacatccgcaattctcaaacctgatgggaatagcttctcaaccaaccagaacttgatccccgggaccaacgttcttcatttttctgcacgttataaaggcaccggtacaagtgcatcagcagggcaagcaaatgctgacgcgacttttattatgagatatgaataatcaaaaccacgttgttttgaattatatatcacgtcttataacaaagtaatgtaccggttgtctgaagcggtatggtggcaatgtaaatcgaaatcatgttcactttgtatcatgccgctttattaaatgaaaagggaatgatgtgttgtaagaaaccaaagcaatcatttctttatattccttatttttgccgtcaggaatacacaaggcgtattaactatgatgactaaaataaagttattgatgctcattatattttatttaatcatttcggccagcgcccatgctgccggagggatcgcattaggtgccacgcgtattatttatcccgctgatgctaaacagactgcggtatggattagaaatagccataccaatgagcgctttctggtcaattcgtggattgaaaacagcagcggtgtaaaagaaaagtcattcatcattacaccgccactgtttgttagtgaacccaaaagcgaaaatactttgcgtattatttacaccggtccaccgctggcagcagatcgtgagtctctgttctggatgaatgttaagacgatcccttcggtagataaaaatgcattgaacggcaggaatgttttgcaactggcgattttatcgcgcatgaaattatttctccgtccaattcaattacaagaattacccgcagaagcgccggacacactcaagttttcgcgatccggtaactatatcaatgttcataatccatcacctttttatgtcaccctggttaacttacaagtgggcagccaaaagttggggaatgctatggctgcacccagagttaattcacaaattcccttaccctcaggagtgcagggaaagctgaaatttcagaccgttaatgattatggttcagtaactccggtcagagaagtgaacttaaactaaccgaatcatctgacaatatcagagctaattatgaaaatacccactactacggatattccgcagaggtatacctggtgtctggccggaatttgttattcatctcttgccattttaccctcctttttaagctatgcggaaagttatttcaacccggcatttttattagagaatggcacatccgttgctgatttatcgcgctttgagagaggtaatcatcaacctgcaggcgtgtatcgggtggatctctggcgtaatgatgagttcattggttcgcaggatatcgtatttgaatcgacaacagaaaatacaggtgataaatcaggtgggttaatgccctgttttaaccaggtacttcttgaacgaattggccttaatagcagtgcatttcccgagttagcccagcagcaaaacaataaatgcatcaatttactgaaagctgtacctgatgccacaattaactttgattttgcagcgatgcgcctgaacatcactattcctcagatagcgttgttgagtagcgctcacggttacattccgcctgaagagtgggatgaaggtattcctgctttactcctgaattataatttcaccggtaacagaggtaatggtaacgatagctatttttttagtgagctcagcggggttaatattgccccgtggcgtttacgcaacaatggttcctggaactattttcgcggaaatggatatcattcagaacagtggaataatattggcacctgggtacagcgcgccattattccgctgaaaagtgaactggtaatgggagacggcaatacaggaagtgatattttcgatggcgttggatttcgtggtgtacggctttattcttctgataatatgtatcctgatagccagcaagggtttgccccaacggtacgtgggattgcccgtacggcggcccagctaacgattcggcaaaatggttttattatctatcaaagctatgtttcccccggcgcttttgaaattacagatttgcacccgacatcttcaaatggcgatctggacgtcaccatcgacgagcgcgatggcaatcagcagaattacacaattccgtattcaacagtgccaattttacaacgcgaagggcgtttcaaatttgatctgacggcgggcgattttcgtagcggtaatagtcagcaatcatcacctttcttttttcagggcacggcactcggtggtttaccacaggaatttactgcctacggcgggacgcaattatctgccaattacaccgcctttttgttagggctggggcgcaacctcgggaactggggcgcagtgtcgctggatgtaacgcatgcgcgcagtcagttagccgacgacagtcgtcatgagggggattccattcgcttcctctatgcgaaatcaatgaacaccttcggcaccaattttcagttaatgggttaccgctattcgacacaaggtttttatacccttgatgatgttgcgtatcgtcgaatggaggggtacgaatatgattacgattacgacggtgagcatcgcgatgaaccgataatcgtgaattaccacaatttacgctttagccgtaaagaccgtttgcagttaaatatttcacaatcacttaatgactttggctcgctttatatctctggtacccatcaaaaatactggaatacttcggattcagatacgtggtatcaggtggggtataccagcagctgggttggcatcagttattcgctctcattttcgtggaatgaatctgtagggatccccgataacgaacgtattgtcggacttaatgtttcagtgcctttcaatgttttgaccaaacgtcgctacacccgggaaaatgcgctcgaccgcgcttatgcctcctttaacgccaaccgtaacagcaacgggcaaaatagctggctggcaggtgtaggtgggaccttactggaaggccacaacctgagttatcacgtaagccagggtgatacctcgaataatgggtacacgggcagcgccacggcaaactggcaggccgcttacggtacgctgggggtcgggtataactacgaccgcgatcaacatgacgttaactggcagctgtctggcggtgtggtcgggcatgaaaatggcataacgctgagccagcctttaggggataccaatgttttgattaaagcacctggcgcaggcggtgtacgcattgaaaatcaaactggcattttaaccgactggcgcggctatgcggtgatgccgtatgccacggtttatcggtataaccgtatcgcgcttgataccaatacgatggggaattccatcgatgttgaaaaaaatattagcagcgttgtgccgacgcaaggcgcgttggttcgtgccaattttgatacccgcataggcgtgcgggcgctcattaccgttacccagggcggaaaaccggtgccgtttggatcactggtacgggaaaacagtaccggaataaccagtatggtgggtgatgacgggcaagtttatttaagtggtgcgccattgtctggtgaattactggttcagtggggagacggcgcgaactcacgctgcattgcgcactatgtattgccgaagcaaagcttacagcaagccgtcactgttatttcggcagtttgcacacatcctggctcataaaggaaattatcaataagataatctgcagattattattggcgatggcatgtttgtgtctggcaaacatatcctgggctactgtttgtgcaaatagtactggcgtagcagaagatgaacactatgatctctcaaatatctttaatagcaccaataaccagccagggcagattgttgttttaccggaaaaatccggctgggtaggtgtctcagcaatttgtccacccggcacgctggtgaattatacataccgtagttatgtcactaactttattgttcaggaaactatcgataattataaatatatgcaattaaatgattatctattaggtgcgatgagtctggttgatagtgttatggatattcagttccccccgcaaaattatattcggatgggaacagatcctaacgtttcgcaaaaccttccattcggggtgatggattctcgtttaatatttcgtttaaaggttattcgtccctttattaacatggtggagatccccagacaggtgatgtttaccgtgtatgtgacatcaacgccttacgatccgttggttacacctgtttataccattagttttggtggccgggttgaagtgccgcaaaactgcgaattaaatgccgggcagattgttgaatttgattttggtgatatcggcgcatcgttatttagtgcggcagggccggggaatcgaccagctggcgtcatgccgcaaaccaagagcattgcggtcaaatgtacgaatgttgctgcgcaggcttatttaacaatgcgtctggaagccagtgccgtttctggtcaggcgatggtgtcggacaatcaggatttaggttttattgtcgccgatcagaacgatacgccgattacgcctaacgatctcaatagcgttattcctttccgtctggatgcagctgcggcagccaatgtcacacttcgcgcctggcctatcagtattaccggtcaaaaaccgaccgaggggccgtttagcgcgctggggtatttacgcgtcgattatcaatgaggtacggagaatgagaagagtactctttagctgtttctgcgggttactgtggagttccattggatgggcagctgaccctttaggaacgattaatatcaatttgcacggtaacgttgttgatttctcctgtaccgtaaacacagcggatattgataagacggtagatttaggcagatggcctacgacacaattactgaacgctggcgataccacggcactcgtcccttttagcctgcggctggagggatgtcctccgggttcagttgcgattttatttacgggaacgccggcatccgataccaacctgctggctctggatgatcccgcaatggcacaaaccgtcgccatcgaattacgtaatagcgatcgctcccggctcgcactgggggaggcgagcccgactgaggaagtagatgcaaatggcaatgtcacactaaacttttttgccaattatcgagcgttagccagcggtgttcggccaggtgtggcgaaagcggatgcgatatttatgatcaattataattaatattatattaattcgtataatttggcgtagtcgataagctctacaattgaatgcaaacctagcttgccataaatattagatttatgcgcactaactgttttattgctaagtaataacttatcggcaatttctttattagataatccgctaaccagataacgtaatatggtcacttcacgattagatagcacagtgatcgttgaactattcgtactacatttattgctttttatatagttaagcgtttcgctgggaaaaaacgtgtatccggagaggatcatctgaacggcatgaaaaatatcattctgatcattgcatttactgacaaaaccgttagcaccagcttgtatcgctctgccagcataaaagcattctgatttcgatgataaaaataacactttcactgtgctctggatttgtttgatccttttcaggaaggtaaaaccgtctgttccgggcaagtctatatccataatgattaaatcaacaggacgggttcggagataatcgatggttatgcggtaatcatccgttttcaggacaatctgcaattcactgtttttttgcaacagaacttcaatagacattctgatgataggatgagtatccataatgatcaccgacgttggtttcatagttaccagtctcataggagcggacaattttccgttagggcggtaaattgtactttgatacatgaaaatacgggttttcttgattcagacgcgcagcggtgtgcgtttgtttgccactatagcgaaataaatcagaaaatcagacgcggtcgttcacttgttcagcaaccagatcaaaagccattgactcagcaagggttgaccgtataattcacgcgattacaccgcattgcggtatcaacgcgcccttagctcagttggatagagcaacgaccttctaagtcgtgggccgcaggttcgaatcctgcagggcgcgccatttcttcttcatttatgcccgtcttatccgtttccgctttgcccttcaccacatcactttttgtcgctgtttggcgagataattcaacggtgtcaggccgtaaaacgccttaaaaacagagataaagtacgacgtgctgctatagccacataattgcgccacctgagtgatatttttgttatccatcaataacatctgtacggcgtaacgcatacgacactctgtgacaatctggctatagctggtattttcgttttttaatttctttttgagcaggctggggcttaaacatagcgaactggcgacaattcgcagattccagtagtgctgaatatcgctttgaataatgcggcagacgctgtcgcggacgctgctgcgtaagatatacatcagtagggcaataaaccgcgattgctcaagaaagttagacaatacggtaaaaagcaatgcgcgcgtcaactccgcttcgcagggtttgctgggttgctgcttgctgtggttggcggctagccggaacacttccggtgtacggctatgacaagcgataaccggggtagccagccgcgaccagggctttacacaggttaagttcttatttaaaaacaacagataatcgttgatgatgttacggttgatgtgggtgattaatacgtgatttaacgttgagagttcaatgacgttattgttgcacgcgaaggcggccaggtagtttttcggaagggtaaacgtagcatggttattgacgcttacctctacctctttttcggtcaggatcaccacgcaaggtttactgctgctcaattgcatttcgcactcctcagatatcagaaactccgctcaaaggatctatgcttcctgcatgagtgatcggcccgttcgccgataacgatcttctttctttagcacgctttttagcaattaatcttgatggaattctgacgagagcgaaagaggtaagccaggtcgtacccgacttacctggaggagatttaatactcgagaatgccgtgcgcgacgggcaaatagcgcagagagaaatagagagtgtctttaccgcaagaggaacgtttcgctaacagcgaggcaatttctgcgtccggtttcggtttcgctgtaaaggttttgcctttgccggcgacaaacagttcataaacaatgccgcttgctggggcggagctttggcaatcggcgctggcctgtagataacgttcacgctgttcagcggtaagtttatccacgccgctgccatcctgtacccagacattaacgccggttgctttaacgtgttccagcagttggcgatagccatcgggcgacatgtttccggcgaaaaaactactgatataaaccggttttgctgaaacatcgctaatcagccgctgctcgttgtttaaccatgttagcaaaggctgacgggcggcttcgctgcgccagttcaggtcgtcaatttccgcgctgatgtaccagccatccggcgttacgccaggcgcggcgctccataatctggcttgctggagatcggcagccagcaggcgattaagatagctttccagcgctgcggacgactgtttctggtgcataaaaaattccggatcggcgttcagcccgacaatcagcttcaggccagcctgttgcgcagctgcggcccgcttaaacaataacgcgcgctgttctggctgggtgaatgcatcgccgtaacgggtccattgcaaaaccagggtatcgaagccttgcaaacgtaactgactcatcagcccctgccactgggtatcggtaacctgactatcacggttttgtggttgccagataatacctttcatcgcaaaggaaaaagggctgaccaaaagcagtgtcagcaatacgaaaatgaacttacgcatttaccagtgcactccaatggtgagaaacgcgttgttgcgctctccgttacgttgattaatcgccttaaaggtatgttgatactcgacgccgagactgactttgtgcggccaggcgtcgtagtgcgtctcgccggtccagatattccagcggaccccgacaccgccaagctgcgcgccctgagtgcctttatcacgatagccgttgtcctgaacgtgagcgtaaggctcaatagtctgtccgttagctaccttctgatgccagctgacgcgataatctgccgtccacgcctgaatatcctggcggatatattgcgccgcatcgaggtacaggttttgggcaaaccagcctgaaccgttcgggtgccattcgtcgctgtatttgccgccattaaagaatgaggcgctggcgcgcagcatggtatcggatgcgccattttgcccgttcagcggcaactgctgttcgacggcgaggaaaaagatctgatcgcgcagcggcttccagcgtagaccggtgccggacatcggatttttcaccggcatcatcaccccgttttctccggtatcggcaaagacgcggctataaactgagagcaggtcgccttccagcagcatattgcgtccgatgcggtactcggcttccagttgcccgtagctacgatagcttttccctggcgctgcgccgccgacattattgttagcggtgctcattgccccggaacgcaagccgatagaagaatcgaaactgaacgtccagcggcgaccgacctcctcatgcaaacggcggaaattgaagcgttgctgattttgctctggggtcagtggggttatcagcgcctgattatcaatgtcatcaatcaccagccgggcgtagtgctgcgtcgcaggcatgtcatccagacgctggttcacataggccagttgtcggatcagtgccggatcgtccggtagccctttatgcgcctgttcgagcatttcccgcgactgtgcgatatcaccgctatcccacaaggcgtaaccaagcgctgcctgggtgttgctattattcggttccagttccagcgcggcgcgcaaatcactcaccgcggccgggacattatgacgttggcgataaattgtcgcccgcgcaacgtaagcgttggcagaaggcgcaatattgattgagcgcgtgagatcgttcagtgcgagttccggctgaccaggaatgtaacgttgcgcatgcagccaccagtagagcgcattgcttcccagtccacgtttttctgcctgttgtagccagcgatcgcgagccgcaccatttcctgccgcctgggcggtattggcagcagcaagcagatcctcattgctcatgtcgtgaagactgattttctgccaggccgccagtgcggtggcgtagtcctcaacctgatacgcctgataggctaccgcacgatgttgccaggcgttcggttgtcgttgttcggcctgaagccatgcatacaacgccacaccgggtagcgtgtcccgataacactttgccagacggttccaggcggcggcatcgtaggaaggcgacatatcgcccagcaagcgaactattgccgggcaattatctgcaatacccggcaactggctttgccactgacgttgctccgccagcggtaagggtttcgataaaatcgccaccttcgccggcgttgccaggtaaggatgactttccagcagagacgccagtcgcgccattaaagtctggctgacacgcgcatcgccctggaaaggatagcgttgcagcaataaatcggcagcttcgcgtgactgctcgttctgcatcagttgccaggttagttgatccaggcgggtaagatttgccggttcttgctgatacagcaagcgtgccagacgcagagcttcagccttgttgcgggtcgccacgctgacagcataacgctcctcaagcatttcattggcggggagggtggcgagcagtttttgcgctgcgtcgtactgaccttcttttaacagcaccggtagcgtcgcgccaacaacatactggcggttgtcggcaaactgtaccgtataattcgccaatgcctgaacggggttggcgctgtatttagataacagatagagccaacttttctcttgtgcgtccgtggtaaacagcggcttattttcattgagataatgctggaggcgtgctttttcgccacgataagccagcgcggtcgcgtaagtaatatatgactgaggatcggtgaagatcccctgtgattgcagtgccaggatccgatcgtctagctgcccggcaagaagcacgtcaaaccactgacggcgttctgccgcgcttaatgtgttctgctggcgtgcttcattgtatagcgtatctgcctgggaccattgtttcaggtagattgcccgttgcagcagatcggttcgcagcgtttttccttccggcgatgcagcaaacgtcgcatcgttcagttgcgctctggcgacaggtaactgtgccagccgcagggcattctgcccgacatcactgcgacaacgcagggtcggtgcagcatcgcacgctttttgctgggcaagcagttcttcaacagtcgtaacgcttttcacttcaactggaatagccgccagactgcgctcaagtcgggcatctcctgggtgacgtttcagttgatcctcaagcaacagccgcgcccggtcatcatgaccaaaatggcgataggcttccgcaaggtataaagtcagcggaatattatccggcacctgctggtgtatatattcaaattcgcggatggcggttgcttcgtcgttatttttctgtgccttcagcgccttatcgagacggggataaataacaaaatggcgataatcgctcagacccagctcttctgcgctggtgccgatattgtctgcgagtgcgctggtactcaataaagacgtcagcagtaaaccagaccatccgatgacgcgattaaggttattctccttcattttcggactccagttgcgcaacctgttctgtgtttaaacctgctttgagtaatagtgattgcatcgaaacttgtaattcgcgttgaattgtcaggacgcgatccaacgtttcctggctgataacgccttcggtgaccaaaaacttgccgagcggcagagaactgcgttcatggcgcaataacaacacgttaattgctgaacgattaatatgaccgagcgtggtcagtatttcggcgaacaggaactgatgcggcacatattgccgccagatttcaccggcctgctgttccgtgagccactgatgctgaaccgcattgtacaacattgcccgcggatcgtgaccgcgtcggcgtgcataccagtgacgtaaccctgtgacaatttgtccccgcagaacaatgacgtaacgcactttgcgtccgactttacgcgtcagggccgccagcgaaaccgggtcaataccatcttcactgccgacaattaactcgtcattttccagacgcagcggcagtaccgcataatgcagcgccacggaggccggcatttcggcaatcagcgaggaagggatctgccaggcatcgatggattcccacgccacgccgttttgctctgccagcgcctgtgccagctgctcggcgctaatcagcccctgcatcagcattgaaccgcccaggcgtagaccttcgacgcgattacgcagtgctgtatcgagttgttcttcagtgatgacctgattttccagcagaatttgacctaacgggcgcaacgagcgggtatcgccagtcacgctggggaagtcatgcgttgttttatcccacgccacgcgacgtggatcgccgtgttgaagtacctgttttagcgcgcgccagttggccatgaagttaatcaggttgccccagaaaagacgcaggacggaaagcagcccctgcgtcaggccgtagtagccagtaacgaaaatcacccgctgcacgatgcggttaaccatcaaaccaaagtttagccacagcagggtcattaaccatgcgctgccgctgaaaatagaaaggaaatgccaggcatcgggccacaaactttcatacgccagcaacagcaaaagctggatcatcaccagcatcgcgaggaagctgacaaagttactgattgcccctttgcggtcgcgccagagaaagtagttcagcgtcaggctggaggtccatttatgggttttaaagccttggaaaacaatgccgatgatccagcgggatttttgtcgaaccgcagtcgaaaaggtatcggggaaatattcgcgcacgcagatcatgtttgatgtccgcgcgtgctgtaaaaatttacgctgctcgcgttctttggcttcgtccaccaccggaaaacggacaaaaatttccgtcatacctttttctttcaggcggaagccaatgtcgtaatcttcagtaagactctgcacgtcgaaagcaataccgtcaccgtcagctaacagtgcggtcacggcgcggcggctgaaacaggtgccgacgcctgcgctgggcacttgtccggcgagggcttcacgcaccggaacatctttgccatgcagctctgaaaactcatcaatgtaagtcatgctggtgaagtgcgtccattcgcgttcgaacggatacaccgggatctgaatcagatctttacgctcgaccagatagttgaacagacgcaattccatcggtgaaatcacatcttcggcgtcatgcagaataaaaccagcaaaagcgaaattggcgctacgctcaaattgggtgatggcgtccagcacgttgttcagacagtcggctttgctggtggggccaggacgcgcgcagactaccttatgcacattcgggaagcgagcgcacacttcgtcaacatcacgctgagtatcggggtcgttggggtaggtgccaacaaagatatgatagttttcgtagtcgagcgtggtcgccgccagctcggccatattgccgatgacgcccgtttcattccatgccggaaccataatcgctaacggtttttcatctggtttatacagttcgcggtaactcattcgcgggtagcggcgataaacactcaacttgcgtttaatgcggcgtacccagtagacgacatcaataaaaaaatcgtccagcccgctgatgaacatgatgaccgctaacgttatcgcgattacttttaagccgtagagccaggtagcaaaaacatcaagaagccagtccacacaaaaaccttacattaacgctggttatgtttagggtggcgtatattaaggttttttatgaattgtgacagctttttaccattaataggtatgactattgcggcacgttatttttacactggttataaaagttgccgtttgcgtagaatgtagacaaaagcatggtgtcctgggacggggaggttaacgtcatagtgaaaaggagcggtggcaccgagcaggtcatcatgtagtggaagtgcctggaggaggtgagcaggcagggcaagattacgaaagcccgttccccgcaaggactgacgccagatagtttctctccatggctgctttttgcatcttacgtcttaaccctgccttgaataccttatcattagtcaaaatattaatagcgatgtgccgtatccctgaaaataattctgctgcatttcctcttcttattttgcagtcgtcttcattcattaccacgtccagacgccagtgcagcttattctccacgtgccagtggtttcggattgctgtggcgaacttctctgcggttaaatcaacagaactgatataatatctgaccgtcatttctggctctttcttttgttctgctattatggaccgaaaggagactgccacgcataatttctttagccctttccattcaaacgtgaaatcaataagttcatcagggacatcgcaaacaatatgaagacggatttcttctctgccgtgactcttttcactcattgcgtaactgtcatgctctggattatttaattctttcagcggaaatttttcctcaaaggctttatttagccgcccctggtttccttttaccgcgaataaataatcacatccctgtttttgtatcttctctgcaatatctttctggcaacccatcgcatcggttgtgatgatttttcctttaatatccagcatgttaataagttcagggatagctgtaatctcattagatttcttatccgtcttgatctgtccgatgaccagactgtgcattgttgagaacgcactaatgacatgaatcgctcccctgcggtgactcttgtcagaagagtgccggagcgtttttccatcaattgcaatgacgtctttatcatctgaagaatgacaatcacgcatcaagttaataaagcactcgtgaaattttgcaggactgatacaggatacaactctggcaatggtatcgtgaacaggaataccattttcaaaatcaccatattgcttcaaaaaatcgagatgtgtttccccaaaaccctctatatcttcccaaccttctgcaccagaaataacggcacaaatagtcaacagtagaatatccgataatttatgttccactttccagggttgtctgtaatcggggataatagaaatatgttccatcaattttttaagttccattttgttctccttaattatgtaagaagtatttgatcatgtataagcaataaaaaacagcttcaggtaataaggaatatctcaatttttaaacataaaatgcgaattatttagtacaaaaagtgaacttctgatgatctttccctggttaatatccaggcatcatgttacgtgacatggtgtagctattgaaaaactacgttagcggatatttgtttgcctccttttttttacccagcataccccatcccaacaatttgaattaaatgtcgtaaaattgataacttctttaccttttgaaaaatatgttattgggcaaaactcatctccacttaatggtttaaagctggttattatgtcacaatttaattgttgtgatagtgattgagcgatgaaatcagttagagatggaagatacttgctttcaatcgatgttgttgatgtgccgaaatcaacttcataagaaaaatcaatcttcgctagtaattcaatatattctgcatctttgtcaataaaagatgtgtcataagtaatgtttttttatactcatttacatcaaagtagtcatattttaatatcgaaaagtcaatgtctagagcatttacaaacttataaatactatcggttagtttacttttatctttatactctatgagtatacttgatttggtgatcatatttttaaaatctccaaaaaggttctaaaacggattgatcaatcacttcaactcgagctgttgaattattaggtttgaagtttccaaagaattcatgaaattcctcaagtgtatttttggaattggaacttctaattaccaggacgataccattatctcccaccaggccaactcccttgttaacattttttacctcatgatatacctcatataatgtagcattatttctaagataaaaattacgaagttcattgttaaaagatgggtattgtcccgttctacatattggattaatctttttttatttctttttgtaataaggccaatgcacactcgccagcaataatttcatcaaataagtattccaatgttcctcttaacactaaagcacgacaatcattttccgtagtgcgtttaataaataactctttttcaatatataactcttgcataacttcagaatttgaagatagtaattggcagcggcatgggaactcaagatgttcattgtataaaacgctaaaaactatgtttcccgcaataataaatatatcttttatcggcagaattatattcatcacaaccccttgtctttcaatattttgagtattgctacatcctcatcagataacccaagcatttttttgtgtcttatcatgaaatccttaacgtgcgtttctgcactccctagtccataacgtcctaatttttcagctattcctagtttctcttgtgtaccatgtaaaaactcttcaagaatagcggctttactcggatttgaacgaacaataatcgtcatgtctaataccgaagcttcggctccaaaatgttcaagcattctgaattcatctgagcctggtaatgctattattaaatgtcttttccgcgatatagccgccagaagttctggggctgccttctcaaccccatgagatcactggagctattcatcattttagataatgaagctcctttatttaatcctaagggatctatccatcttaaaggattcggcacataccggtaagtctgctcccctccctgcaaccccagtggatcactcaccaggtacatcccggtttccggctcgtaataccggaaccggttatagcacagcccggattccacatcctgccactgccccgcatacagcaggccaggggcggcttccgggtccagttccccgcgcgggtccgggtagccggtgtctgcgggcaggctgagtgccagcccccacaggctggtctgtcccggccgccagacggttttaccttcactgttaaagagcatcagcgggcggcccgtcaggtcgctcaccgcatgattcgtccgcgtcacccactgcggggccaccgacggatgcgcctgccgtacccggctgaactgctggcttatcagctcaaagccgttaaacaccaggtgccgtacgctgtacagtttatcatcgcggtattcccggatttccgcaatactgtcgccgtcccacaggtacgtgaagcggattttcttccggtcgcagcgtttctctgttcgtctgccgctggcgtcgtggcggtattcccactgctcaccctgtgcgctgcaatacccggtcagctggtcccggctgtcccaccggaaccgctctgtttccgggcggtagccgtcacggtgtctggtgcggctgaccatccggcctgcggcgtcatagtcatactgcgtgtttccggcctgtttcagccggtggcctccggcatactggtcagtctcttcacttatccggtgcctgcccgcagactgcgccttcaggtagccacaactgtcatagccataggactcatcgccttcgccatagcccagcccggtgcctgaggctgtcaccgccgtgacctggccgttccggtccagccggtactcccgccgggtttcccgtccgtaatcttcccggctggtgacacctgacacgttacccgcgctgtcgtaacggtactcccgtaccagtgagggaaccagcccgtcccatgtggcttcttccggaaaaaatccggcgcgctgggtgacaagctggctggctgcattccagccctgttcacaggcaaaaccccggttactgtgccggagcacttcacgtcccgcctcatcacggctgaacgtcagcgtctcatcccccggcagaatgacctctgtcagttctccggcggcgttgtagcggtacgtggttttcagcagggattcatcggggtgtctgtcgcgttcatcttccggtggcaggatacagcggataacggtgtgttcatcggggtagtggtattcaatggcccgtcggccctgagtggtgacattcacccgcccgcgttcatcatagccggtgcgctgtgatgtaccgtccgggctgaagatacccgtcagcctgccggatttgtcatacgcatactgcgttttgccttccggcgtgatgatttctgccaggcggcctgcggcgtcccggctgtagaggatagtttcctccaggccgttaaccctggcggtacacaggccatcggcgtcatagcggtaacgccagaccacgccgccccagtcatgctcttccgtcacccggccacagttatccagaacataaaggtatgattcgccctgcgggttaatgacttctgtcagttgcagcgtgtctttatcgtagcggtactgccagcggtggccttcaccgtccgttcgcgccaccggcaaatcgaacgggccgtattccattgtccagacaacgccgttaccgtccgtgtacgccagcaggttgccgtggcggtcatagcggaatccttctgcgccggtttctgcccgctcaaggccgctcagtttatggtgctgctgccactgtaaccgcactgactgaccgccggggccgcgcatcttcaccggcaggtcgtgaccgctgtattcggtatggtgttcacggcccatcacgtcggtgagtgtttccggccggttgtggtggtcgtactctatgcccagacgccgttcatcctggcggaatattcccgacaacagcccctgagcggtgtacgccagccgggtctcttcgccctgtggcgacaccaggcttaccggcaggccgcgttcatcgcacagctgtgtccacgtctgcccggcagggtcgatgatgttgctgagcaggccgcgctcatcatagcggtacaaccactccgcgccgtctgccgccgtgtaacggcttaactgaccgtgtgcggcgttgtattcaaacttctccacccgcccggcaggggagtggcgggccagcaggtgatggaattcatcccattcatacgtggtggtgctgccgtccggcgctgcttcccgcagaatattgccgtcaggatcatagtaataacagtgaatgcccttgccgtccgtcacggtggtgcagccgtcaccatagtccagcgtggcgttgtaatagccctccgccccggtgacggtcacgcaccggccctgtgcatcgtaggtgaaacggctccacgtctggtcgttatcggaccagcggatgatccggtccgcagcgtcgtactcataaaacaggtggtagtccagccgcgcatccgcttctgtcagccgcccccgcgcatcctgttcgtaggtcgccagcgtctgtatgccgttatccgtgcggtgaatggctttcaggtagccgctggcgtggtacgtcagtttaagccggatcccgtcggtgtgactgacacccgtgatccggtactggctgtcgcgctcaaacgtgatgcggttgctggcggtgtcgctcatcccgcccagcatgtacatccggtctgcggggctgtgtgccaggcggtcatcgctggtatcgtcagtcaccgggtggcgcagacgcattcccggaaaggcgtcataaaagaagcggctgctcagtgcatccctgtcgaacagctccagataatcatcacggcggcgcagaatgtactgggcgtgatacgggttaaccgccgtatcactttcaccgtcgaaggcgaagttcagcgtggctcccaggctgatgatatccacccggtttccctgttcacgcacccaggcgtattcgctccaggagtcactccagcccacgcccgtcaggccatgcagtggcagtaccgaactgtggaaacgggtgaaggagagggggagggtctggcccagggtgaagtcggtacgttcgtcgcagtacgcgccggttaccggatcgacaggatctgttacccatctgatgactttattggcaatactttttaacgacttacatgttttccccagcaacgcgccgagctttgcgcccagcagcttcccgcttttccccagcaggtttcccagtttgcccagtttcgccagattccccagttttcccagcagtcctgctggcggcagaagatagctggctatcgttattcctcccaggatcattctctgccatggcgggaactccggctggatatccagataggtgacctgctcacccccaataaagacgtccggcgaaccttccacgatcgccgcactgcactccagtttgtcgcccttgcgcgcggcaggctgattgttgataaagacgttgctactgccctgggctatcctcggtggtttgttctccttgtcgcagagcgccgtgtcctcaccggcttccgggaaatccacatcttttttgatttcgccacgcccgcccaccatggtggcaaactccattaataccggaccggcgggaaacagaagcgatgcgccggcgctgacgcgatccataaaaccggcattgctttccgtcagggtgataacagcgttcccccaggccttcgccagtggtactgctttttccgctgccgattcaagcaggtcagtggcaatatcaccccatgagggttccccctgtgggatttcaggtattgctccaggtgggggaggagggggaagggtgacggcggcccttgcagcgggctttccgttaatgtttacattttcagaaccggtattgatggcgccgtccgtgtcacaaaagctgtttatccatgactcaagctggttctgtttctcctccacataatcactcgccttatagctggcatacatcagcgcaggcaccagaaccagcgcataagggctggtggcacaggcggccataatcaggcaaccttctgcgatggtcactatcgcccccagcacggcccctgccagtgcccccagaaaactcttgtgctgaatttcatcgtccagtctggcggcaggtgggccggacttctttgctgccagcatctgtgcaatggctttgtcgttggctgcccgtttcatctggctggcgaccatcgcccgctgcgactgcattcgcattgccagcgtaccgcctgcggtcgctccctgtggcccgcctggtccttcactcatgtgttatccctcggttatgtcagcgcggctggtcctgtttgacatcattctccggtggcaacggggtgaagctctttatcacctccagcagcatcgtcttttgactgttcttcagggataaggaggtgctgaaagtgaaggtcagcagcgtatccccacgccgctggaatacggctatctggctaatccgcccctgattcccttcatcttccggaccgttccaggaataatccagcagccaggccggggcctctgccagagtgatttcccggcaggcatgttcggtgtacccatcaagtttgccctggtacagcgccagcgtttcctggtacagctctggtgtcagggttccctgtggaacggcttcgcgggtaatgaccaggttgatgccactgttatctgtggacaccaggacctgcattgactgatcctgccattgagacggcagttgaatgtggccttcattaaaagtgaactgcataaaatactccctgataatctgagtgaatcagttgatgaaaacagaaccgcccacgatggtgatgccatccttcgacagcctgattaccgtcgattccccgacctgtagctgaatgccatccggcgtcagcgcaattttgctttcctccacggccagcaaaatttccttaatcgccgtataagcctgtataccgtcgccttcgccaccattgtttacagcgtcaacatgcaccgaaccggcaatcgtgcctctgtcctgaaagacatcctcagataaagaccctttcagtactccggtgattttgtggcctttttccaccgtaagaaggcggttaccttcctggatcgtgaccgtctggtcattttttacggtttcgcgatgatcgtgttttacggtggtggtacggtcgttgagcacttcggtatccatgttcttctgcgcgtggatgtagacctgttctctccctgtcgcatcatcaaacttcagctcattaaatccgctgcccatgtacgttttggagcggatggtcatctgtgtctttgttcccggcaggctgccgggggtgcggttttcctggtggtaggtgcgccccataatgatcggctggtccggatcgccgttgaggaagtctacaatcacctcctgacccacacgcggtatcgccaggtggccaaaaccggtgcctgcccacgcctgtgccacacggatccagcacgaactgtcttggtctgccgggttataacggtcccagttgaacttcacccgcacgcgaccatgttcgtcgcagaagatttcctcgcctgccggtcctgtcacgacagcgctctgcgggccgtcgaccagcggtttcagcaacggctgtggtcgccatgttctgtctgccgggatcaccgcaaaatggttctccagcgccgtccccgctccctgccgtcctggcaccgcctgtggctgttcgccgtgcagttcacttgccaccacctgccattcccggttcaggttcgcctgcggatgccccgtcagcacaattcgccgtcccggccatatctccggcgagcggcccattccccgcgcggtttctgcgttgtttcgccagccgtccatctgccagcgggcaaagttctgcccgtgggcgctcttgaaacgtccggggtagtcatacacttcatactgcgtgcgctggtagtcctggtgctggccttcctgttcaaaacgtccggcccagccggggcgtttaaaggtgtagtctttggtcaccacggaagaagggcggatttgtgcgctgtagcggaactggctgatgcagagggtgctcacctcggtacgggtgttcgggttccatgggatttcaaaagattcgggcagatggcggactgtgtcgcacagcaccaggctctggtcggtacttttgtaagcatgctcctcataaaagaagatgccttcctccgccgccatccggcacagaaaatcgtaatcagtctcaccgtactggacacaaaactcacgggaaggatgcggctcgctgaacagcggactccattcggtcaccccgttttcctgcaacatcgtgccgaggatgcttttgatgtcctcgttctggaagatacggaagttctggcgcagaccggcacgccacagcggcgggtgcaccttcatgctgtacagcatctggtttttgtcgttctccccgagttcaaaccaggtcaccacgcctttcacccggcgctgtacttcatcgccctgccatatcgtcaggtaggccattttgtccagcacctgcgcaaattcaagggagagaaactgctggctgaccagggagagatcgagggaaaagagcgaagagagtgactggttcagatgaaaggaaaccaccgcaaaagcatccggcggcaggccgtccacttccagtgtgaaacgtaatccggttgacatagcaacctccagtaaaatgaataatgatccgtaccgtacaactgcggataatgtgataagcgggacgacttcagacgttattagggaaggaacagaaaatgctatggttatgtgagaattttgtttaaatattactttacagaaacgggtgtctgttcagtcaaaaaaataatcacaagctcaacctcttgtttcttggcgttattcaggacaggtacgcatatcacaacgagtaacaaaaacgtaaagttaaaccaatattcataatatatttttattcacagcaataaataatccaattaacattattaaaatgaatgattgcataagaaatatatgctaccgctccaccctgataacatgatctgcacattgcacatcttaacgttgttaaatactggctcaatagtggatattttaaattaggaatttatcaaattcacttgataaatagattgagtgaataatataacaattaatgatgattaatcgcgattaaattattcattgctttatatgatagatggcttgtttataacgatgaaaatttagaaagggcattgtgatctacaattggaagaaacacagatttaactaagtttcatatacaaaaatctcgtgaaactttgaaaaataaaagccttcgatatttcatatgtttaataagtttttctctaatttgttgatcaacaataccaggaggtgatgcaccacgccctgaatttgaacttaataatcactctctctccggcagcataatcacaaaccttgtcccccgcgcatctgacgttaccgcaaccgtgcctttatgcgcgacaacaatcgatttcactatcgccagcccaataccgctaccttcaccttttcgctggcgggaagggtcaacgcgatagaaacggtcaaacaatcgcggtaagtgctcgggcgcaatgggcgtaccggggttttcgacggaaacttgcacctgatgattgaccgtctggcagcgcactacaatagcctcactgggtggcgtataacgcagggcattagaaagcaggttgcttaacgcccgacgcagcatcagcggatcgcccgcaacctgacatttgtcgccaacaaatcgcaactccacgccgcgatcttccgctaacgcctcgaaaaaatcgaacactttgccgacttcatccgccaggttgagcattttcttttcggggattagctggttgttatcggcctgagcgagaaacagcatatcgctgaccattttcgccattcgcgtcagctcttcgagattagagtagagcacatcttccagctccttctggctgcgagactggctgagggcgatttccgtttgcgtgatgagattggtaatcggcgtgcgaatttcgtgagcgatatccgctgagaaattggactggcgggtaaagacatcctcaatacgctcgatcatatggttgaacgacagtaccagctgttccagctcaatcggcacggtctgcgggtcgaggcgaacgtcgagatctttcgaggtaatattctggatttgacggctgacgctgcggatcggcgcgtgacctttatgtaccgccaacagtacgataaagacgatcaggatgctgattaccgatgcggtcataataagtttattcatcaaatcatttatgtaatgaagatgaaaatcgatcgaaagcgcgatgtagagcgtataaatcggtttgccgtccaccaacgggccaaccggcaagttaatcatccgccagttgctgtgttccatatgcccgtgaccgtggcctggcatcatcatcgtcgggccggaaaggagatacacctcgccaccctgagcgtctttatcgggtatggcgtcacgcgtaaactcgcggatatccggcgcaccgggggagtgatacaccgttttaccctgactatctgccagggaaatcaacacattggaataaccactgacgatatcttccagcgtcattaagcgtcgggcttgcgtttcgtcagggtgatttagtacccgttcaagggtggcgctaatctcttttaaatcattaatatcctgctcggcaaaatgaacttttactgagtggatcatgatccatgcaaaggcgaaaaacgccgcgatggtggccaggctgataaaaaaggtcaggcgggttgccagcgaaaacgggcgctgaaatggcttactgaccatccggcacctcaagcatgtaacccacgccgcgcacggtctgaattagcttcggctcaaagtcgttgtcgattttgccgcgcagccgcttcaccgccacatcaatagcattggtatcgctgtcaaaattcatgtcccatacctgcgaggcgataagcgagcggggcagcacttcgccctgatggcgaaggaagaactccagcagagtaaactctttactggtcaaagtgatgcgcgtgccgctgcgggtgactttgcggctgacgagatcgaccatcaaatcggcaacctgaaactgactttcgataatcaccgccgccccgcgccgcagtaatgtgcgcacccgcgccagcagttcagcaaaagcgaatggcttcaccaggtagtcatctgcccccaactccagccccttgacgcgatgttcaatggtgccaagcgcggtaagcaacagaatcggcatccctttattggcggagcgtaacatgcgcacgatatcccagccgttcacgtccggcagcataatatcgaggattatcagatcataatcaccggtcatcgccagatggtagccattcagcccgttgtcggccaaatcgaccacaaaaccggcttcggttaaccctttggtcaagtattctccggttttcttttcatcttcgacaatcaacagtttcatatttcctccgcatgttgcccgggcaattctagagtagcgggatcagatggcaatcgcttattggcaaaatgacaattttgtcatttttctgtcaccggaaaatcagagcctggcgagtaaagttggcggcataaaatcaccagaaattatgagcctatgtctccttgtaaacttctgccattttgtgtggcccttgcgctaaccggttgttcactggcaccggattatcagcgtccggcaatgcccgtgccgcagcagttctcactcagccagaacggcctggttaacgcagcagataactatcagaacgcgggctggcgcaccttttttgttgataatcaggtgaagacgctgattagcgaggcgctggtgaataatcgggatttgcgcatggcgacgctgaaagtgcaggaggcacgggcgcaatatcgtctgaccgatgccgaccgctacccacagctcaatggcgagggcagcggcagctggagcggtaatcttaaagggaataccgccacgacacgggagttttcgaccggccttaacgccagctttgacctcgattttttcggtcgcttaaagaacatgagcgaagccgagcgacaaaattatttagccactgaggaagctcagcgcgcggtgcatattctgctggtttctaatgtcgcgcaaagctatttcaatcagcaactggcgtatgcgcaattgcaaatagccgaagaaacgctgcgtaattatcagcagtcatatgcgtttgtcgaaaaacaactgttgacaggtagcagtaatgttctggcgctggaacaggctcgcggggtgatagaaagtacccgcagcgacatcgctaaacgtcagggggaactggcgcaggcgaataatgcattgcaactgttgctgggaagctacggcaagctgccgcaagcgcagacagtaaacagcgacagcctgcaaagagttaaattaccggcgggattgtcgtcgcaaatcttattgcagcgcccggatattatggaagctgaacacgcgttaatggcggctaatgccaatattggcgctgcacgcgcggcattttttccgtctataagcctgaccagcggaatatcgaccgccagtagcgatctatcgtcattatttaacgccagcagcgggatgtggaattttatacccaaaattgagatccccatttttaatgccggacgcaaccaggccaatctggatatcgccgaaattcgccagcagcagtcggtggtgaattatgaacagaaaatccagaacgcctttaaagaagtggcagatgcgctggcattacgtcaaagcctgaacgatcaaattagcgcccagcagcgttatctggcatcgctgcaaattactttgcaacgggcgcgggcattatatcagcacggcgcagtaagttatctggaagtgctggatgccgagcgttctttatttgcaacccgacaaactttacttgatctgaattatgcccgtcaggttaacgaaatttctttgtataccgcacttggtggcggttgacagcaatatactcgtcatacttcaagttgcatgtgctgcgtctgcgttcgctcaccccagtcacttacttatgtaagctcctggggattcactcgcttgtcgccttcctgcaactcgaattatttagagtatgacttttaactccaggagagaataaatgaaaaaagcactgcaagtcgcaatgttcagtctgtttaccgttattggctttaatgcccaggctaacgaacatcatcatgaaaccatgagcgaagcacaaccacaggttattagcgccactggcgtggtaaagggtattgatctggaaagcaaaaaaatcaccatccatcacgatccgattgctgccgtgaactggccggagatgaccatgcgctttaccatcaccccgcagacgaaaatgagtgaaattaaaaccggcgacaaagtggcgtttaattttgtccagcagggcaacctttctttattacaggatattaaagtcagccagtaacccaggtttaatgagatgaaaaaaatcgcgcttattatcggcagcatgatcgcgggcggtattatttctgcggcaggttttacctgggttgcaaaggcggaaccgcctgcagaaaaaacgtcgaccgcagaacgtaaaatcttattctggtacgacccaatgtatcccaatacgcggttcgataaaccaggtaaatcgccgtttatggatatggatctggtgccgaaatatgccgatgaagagagttctgcgtctggtgtgcgcattgacccgactcagacgcagaatctgggggtgaaaacggctaccgtcacgcgcggaccgctgacttttgcccagagtttcccggcgaatgtcagttacaacgagtatcagtatgccattgtgcaggctcgcgctgccgggtttatcgacaaggtgtatccgcttaccgtgggcgataaagtacaaaagggcacaccgcttctcgacctgaccattcctgactgggtggaagcgcagagtgagtatttactgctgcgcgaaaccggcggtacggcgacccagactgaaggcattcttgagcggctgcgactggcgggaatgccggaggcggatattcgccgcctgatcgccacgcaaaaaatccagactcgctttacgctcaaagcgcccattgatggcgtgatcaccgcgtttgatctgcgcgcgggaatgaatatcgccaaagataacgtggtagcgaaaattcagggtatggacccggtgtgggtcactgctgcgatcccggagtctatcgcctggctggtgaaagatgcctcgcagtttaccctcaccgttccggcgcgaccggataaaacactcaccatccgcaaatggacgctgctacctggcgtggatgccgcgacccgcacgctgcagctgcgtctggaagtcgacaacgccgacgaggcgctaaaaccgggcatgaacgcctggttgcaactcaacaccgccagcgaaccgatgctgctcattccgtcacaagcgctgattgataccggcagcgaacagcgggtgattaccgttgatgccgacgggcgctttgtaccgaaacgcgttgctgttttccaggcatcgcaaggcgtcaccgcattacgctctggtctggcggaaggtgaaaaggtggtttccagcggcctgttcctgattgattccgaagccaatatttctggcgcactggagcggatgcgctctgaaagtgctacccatgcgcattgagggaataaccaatgattgaatggattattcgtcgctcggtggcgaaccgttttttggtgctgatgggcgcgttgtttctgagcatctggggcacctggaccatcattaatacgccagtggatgcgctgccggatctctccgatgtgcaggttattattaaaaccagctatcccggtcaggcaccacaaatcgttgaaaatcaggtgacttatccgctaaccaccaccatgttgtcggtgcctggcgcgaagactgtgcgcggtttctcacagtttggcgactcttatgtgtatgtcattttcgaagatggcaccgatccgtactgggcgcgttcgcgggtgctggagtacctcaaccaggtacagggtaagctgcctgcgggagtcagcgccgagctggggccagatgccacgggtgttggctggatctatgaatatgcactggtggatcgcagcggtaagcacgatctggccgatttacgctcattacaggactggtttctcaaatatgagctgaaaaccatccctgacgttgcggaagtggcgtcggtgggcggtgtggtgaaagagtatcaggtggttatcgatccccagcgcctggcgcagtatggcatcagtctcgccgaagtaaaaagcgcgctggatgcttcaaaccaggaagcgggcggttcgtcgatcgaactggcggaagcggaatatatggtgcgcgccagcggctatctgcaaacgctcgacgactttaatcacatcgttttaaaagccagtgaaaatggcgtgcccgtttatctgcgcgatgttgcgaaggtccagattggcccggagatgcgccggggcattgccgaactaaacggcgaaggcgaagtggcgggcggggtggtgatcctgcgatccggcaaaaacgcccgagaagtgatcgccgccgtgaaggacaaactggaaacgctgaaaagtagtctgccggaaggcgtggagatagttacaacatacgatcgcagccagctcattgaccgcgccatcgacaacctcagcggcaagttgctggaagagtttattgtggtggcggtagtctgtgcgctgtttctctggcatgtgcgctcggcgctggtggcgattatttcgttgccgctggggttgtgtattgcttttattgtcatgcacttccagggactgaatgccaatattatgtcgttgggtggcattgcgattgccgtcggggcgatggtcgatgctgctatcgtcatgatcgagaatgcgcataaacggctggaagagtggcagcaccagcatcctgacgccacgctggataataaaacgcgctggcaggtgatcaccgatgcgtctgttgaagtggggccggcgctatttatcagtctgctgattatcacgttgtcgtttatcccgatcttcaccctggaagggcaggaagggcgtctgtttggcccgttggcgttcaccaaaacgtatgcgatggcgggtgcggcgctgctggcgatcgtagtgatcccgatcctgatgggctactggatccgtggcaaaattccgccggaaagcagtaacccgctcaatcgctttttgattcgtgtttatcatccgctgttgctgaaagtactgcactggccgaaaaccacgctgctggtggcggcgctttcggtgctgacggttctctggccgctcaataaagttggcggggaatttttaccgcagatcaatgaaggcgacttgttgtatatgccatcgacgctgccggggatttccgcagcagaggcggcgagtatgctgcaaaaaaccgacaagctaattatgagcgtacctgaagtggcgcgggtatttggcaaaaccgggaaagcggaaaccgccaccgattctgctccgctggagatgttagaaacgaccatccagcttaagccgcaggagcagtggcggccaggcatgacgatggacaaaatcattgaggaactggataacaccgtgcggctgccggggctggcgaatctgtgggtgccgccaattcgtaaccgtatcgatatgctctcaaccggcattaaaagccccatcggcattaaagtttccggcactgtgctggcggatatcgacgcgatggctgagcaaattgaagaagtagcgcgaacggtgccaggcgtagcttctgcgcttgccgagcggctggaaggtgggcgctatatcaacgttgagattaaccgtgaaaaagccgcacgttacggtatgacggtggcggatgtgcagttgtttgtgacttctgcggtgggcggggcgatggttggcgaaacggtggaagggattgcccgttatccaattaatctgcgttatccgcaaagctggcgcgatagtccgcaggcactgcgccagctgccgatcctgacgccgatgaagcagcaaatcaccctcgcagacgtggccgacattaaagtctctaccggaccgtcgatgctgaaaaccgagaatgcgcgcccgacgagctggatttatatcgatgcccgcgatcgtgacatggtgtcggtggttcacgatttgcaaaaagcgatagctgaaaaagtgcagttaaaaccgggcaccagcgtggcattctccgggcagttcgagctactggagcgcgccaaccataagcttaaactcatggtgccgatgacgttgatgattatcttcgtgctgttgtatctggcgttccgtcgggtgggcgaagcgttgctgattatcagcagcgtaccgtttgcgctggtgggcggcatctggttgctgtggtggatgggctttcatctttccgtggcgacgggcactggctttatcgccctcgccggggtcgccgccgaatttggcgtggtgatgctgatgtatttacgtcacgccatagaggccgtgccgtcgttgaataatccacaaacattcagcgagcagaagctggatgaggcgttatatcacggcgcggtcctgcgcgtgcgcccgaaaacgatgacggtggcggtgattatcgccggtctgctgccgattctgtggggaacgggggctggttcagaggtgatgagccggattgccgcgccgatgattggcggcatgatcaccgcacctttgctgtcgctgtttattatcccggcggcgtataagctgatgtggctgcaccgacatcgggtacggaaataaaagcaggataccccgtttaaccgtgtggattgtgtcttgcgacgatgggcactaaatgttaaaaggtgcccctcaacaaaaaagacacacaggggaaaggcgtgaaaaacgcgtcaaccgtatcggaagatactgcgtcgaatcaagagccgacgcttcatcgcggattacataaccgtcatattcaactgattgcgttgggtggcgcaattggtactggtctgtttcttggcattggcccggcgattcagatggcgggtccggctgtattgctgggctacggcgtcgccgggatcatcgctttcctgattatgcgccagcttggcgaaatggtggttgaggagccggtatccggttcatttgcccactttgcctataaatactggggaccgtttgcgggcttcctctctggctggaactactgggtaatgttcgtgctggtgggaatggcagagctgaccgctgcgggcatctatatgcagtactggttcccggatgttccaacgtggatttgggctgccgccttctttattatcatcaacgccgttaacctggtgaacgtgcgcttatatggcgaaaccgagttctggtttgcgctgattaaagtgctggcgatcatcggtatgatcggctttggcctgtggctgctgttttctggtcacggcggcgagaaagccagtatcgacaacctctggcgctacggtggtttcttcgccaccggctggaatgggctgattttgtcgctggcggtaattatgttctccttcggcggtctggagctgattgggattactgccgctgaagcgcgcgatccggaaaaaagcattccaaaagcggtaaatcaggtggtgtatcgcatcctgctgttttacatcggttcactggtggttttactggcgctctatccgtggatggaagtgaaatccaacagtagcccgtttgtgatgattttccataatctcgacagcaacgtggtagcttctgcgctgaacttcgtcattctggtagcatcgctgtcagtgtataacagcggggtttactctaacagccgcatgctgtttggcctttctgtgcagggtaatgcgccgaagtttttgactcgcgtcagccgtcgcggtgtgccgattaactcgctgatgctttccggagcgatcacttcgctggtggtgttaatcaactatctgctgccgcaaaaagcgtttggtctgctgatggcgctggtggtagcaacgctgctgttgaactggattatgatctgtctggcgcatctgcgttttcgtgcagcgatgcgacgtcaggggcgtgaaacacagtttaaggcgctgctttatccgttcggcaactatctttgcatcgccttcctcggcatgattttgctgctgatgtgcacgatggatgatatgcgcttgtcagcgatcctgctgccggtgtggattgtattcctgtttgtggcatttaaaacgctgcgtcggaaataaggcattcacgctacatccgacaaaacgatgtccgctctcatccattcgatgagagcggtttttttaattactgcttaaatgcacccgccagagagcgaatatcattgccggttggcgactgatgaagtcgcagaccaaactcttcgacaatcgcaaatatgtgatcgaatatatcagcctgaatgctttcatattccagccacaccacggtgttggtaaacgcatagatctcgagcggtaaaccattatcacctggagccagttggcgtaccattaaagtcatatctttacgaatccgcggatggttacgcagatattcgttcagataggcacgaaaggttccaatattggtcattcggcgcaggtttaataccgactccgtagaaccttgctggcgattccactcattaatttcctgatggcggctggttaaataaggctttaacaaatgcgctttattcagacgttgcatttcgtcttcatcaagaaaacgaatactggtgacatcaatactgatactgcgcttaatacgtcgcccgccagatgctgacatcccgctccagtttttaaaggagtcagaaaccagagaccaggtgggaatagtggtaatggtattgtcccagttacgcactttgacggtggttaacccaatatcgatcaccgcgccatccgcgccgtatttcggcatctccagccagtcgcccagtttcagcatatcgttcgcggaaagctgaatacctgccaccagaccaagaatcggatctttaaataccaacatcagcacggcagccattgcaccaagaccgctgatcagaatcgctggcgactgaccaatcagcagcgagatcatcaaaatgccgaccagaatcgcgccgatcagtttaatcccctgaaatatccctttcagcggtaactgagatgctgccgggaatttctgcgccagattcaaaataacatccagcaacgagaagactgaaagcagcgcatacatcatgatccacaactgcgcgcaggtagtcagaatatctgccgcttcggtgcctttttgcagccagaataccgcctgaatattgacgataatcccctgcagggtaaaagctaaacggtggaagagtttattctgggtaatgatttgcaaccaaagccgtgaactggcgatggcacgtttttcgaaggtccgcagtaccacccaatgcaaaataatatgcaccacgacggcggtcagaaaaataataccgaaaatcatcaccatcgaggtggtgtgatcgatctcaatacccgctaaatcttcaacctgggatattaaatcctgcataacgtctcctttatacaacagcagcctatgatgacggctgaaacagggttatgcaaatcaggagaatctgaggggaaatagccgggcagatgcccggcaagagagaattacacttcggttaaggtgatgttttgcggcagacgtgatttcggcagcgtagcgttaaaatcttcaacgctgtgatgacctaccggaacaaccaccagactggtgtagcctttctctttcagaccaaattctgcatcgaggatggcggcgtcaaaaccttcgatgggtaccgcgtccagacccagcgccgccacgccgagcaggaagttaccgacgttgagataaacctgttttgccatccactctgcatcatcatgcagatctttacggtgcatatcagcgaagaacttgcgacctttatcgttcgcggctttcgcttccggcgtggcaaagcggccatcagcatcttcctggtcaacaaccagcttcagccaggcatcgtccatcgcggtttttgcacagaacaccacgacgtgcgaggcatcaagtattttacgttcgttgaacacataattaccggcagcggatttggcaacacgcgctttaccttcttccgtgctggcaacaataaaatgccacggctgggagttggtgctggatgggctgtattgcaggagagttttgatctgctcggcctgttccggggtaagttttttactggcatcaaatgccttagtggaatgacgctttaaggcgacagaaatgatatccataaagactccatgtgaaagtaattttgcgtgccagcagattacaaggttcaacgagaaatggtaagcgagaaaaatgcgctatagatttccgctttagcctggacgcactcttttttgatcgcgtttagccagaccatcaaccaccagattccacgaatcgttgatcagatcgcgaagtaacgcttcggagatttcctcgccgggatacaccgaaatccagtgctttttattcatgtgataccctggcttaatgcttgggtatatttgctgatttaacagggatttttgtggatcggacttcagattgataaaggggacgccgcgtagctccgacgacagcataaaaatcttgccgccaattttaaaaacatcgaactccgggccaaaaggccagcaaagctcgacaaagggtaactcaagggccaggcgtttcgccgtttcgtgcagtgattgcttatccataaacgttcctttaggcgaaggagaataagcaaagtatgccgcgaagtacggcgataatcgacgtttaatccgccagcgagaaccagcgtcgccagataaagcgcagaacaaaatactcaatagcgcccagcactaaaaaccacagacaaaacaataaagtgtaaagctgactaagatccatcagatggaacgtgctcaccagtttttgtgccagcgtcagccccaatgcgggggcgggaagcagcaggcaagagaggaaagccatcagcaaaatgcctgctgcggtggtcaaggtttctaaagggtgtttcataacattgttaaatataagttaaaacaccattgtcagggatattcttctgtaaggcaattcccgacttagtcaccggcccagatctcacaatgcttttttaccagcccaatcagcgagccgccatcggcgacgaaatcgcgcatcagctgcgcttcattcagaccgctgacgacctggcgatgcagtgcttcaattgcgctcgatgcgccaattttatgtgcggaaggggcgattttttccagcaatcgcaaggtatcttccgttagcggtcgacgatcaccagtgtacggatcggtaatgacgccttccagcccatagcgacaggcctggaaacggttgaatttatacagcaggtaatctttctcctgatgtttgaacgggcgttccgtcagtaaccagtgggcggtggcctgaattaatcccgccatatttaccgcgtggctaagggttaacggggtatccatcacccgaacctccaccgtgccaaaatgaggactggggcgaatatcccagtgcagatctttaatgctgtcgatcatcgtggtgtaactcaaacagcgaaatagggcttcaaattgttgccagttactgacccacggcatcgggccattatcaggaaaggcggaaaaaatattcggtcgtgaggaggcaaaacgcgtatccgttccctgcatatatggcgacgcggcggaaagggcgataaagtgcggcacaaatcgtgacaagccgtgcagcaaataaatggcgtcatcgccactggcgcagccaacatggacatgctgaccaaaaacggtcgcctgctgaatgagataaccaaagttttccagcgtgcgttgatagcgttcgttatcgcatacctcctgacgctgccatttctgaaacgggtgcgtgccaccgccgcaaatttccagatgatggtctgtggctgcctgcaatacgactttctgcatcgctgaaaactgcccggcagcctggttgatatcacggcaaacatccgtcgccagctccagcatactttcggtgatatcgtgctttacctctccggccgtgatcttatttttaaccgcgtcaatcagcattgaagagtcctggcttaagtcatagcccggcggattaaccacctgcatttccagttcaataccgagggtaaaaggttcagaaacatgaaaatcgggtaatggcataggtttctcttatgttggcgttttctattcagtatagaagtcggagcggctgggcgagatgcggaagttctggaatgtttcttttttttggtgatggtgaactgatggtgcctgaagcaatttggctacttttgcaatgtgacaagttatggcagtgctgactggtggcgaagaattttgacgattgagtcatgcagaaaaaaacgggttcagcttcagttgattaaatgaggagtgagaagtccgaaacaggactcactgtataaataaacagctattttgttgaggaagggtaagataacggcgggtgcctgaagctttccggtttcaggtttactctgaggtctggaaagatgaagccccaggagatatttctatcaaccctggggctgccactccaaacccgaacaatttggatggtagtcccttcttcgcatggaggcaatataaacatgctgacgaaatatgcccttgcggcagtcatagtgctgtgtttaacggtgctgggatttacgcttctggtcggagattcgctgtgtgagttcaccgtaaaggaacgtaatattgagtttaaggctgttctcgcttacgaaccgaagaagtagccgttgtgcggggagcaatcccataagcgctaacttaagggttgtggtattacgcctgatatgatttaacgtgccgatgaattactctcacgataactggtcagcaattctggcccatattggtaagcccgaagaactggatacttcggcacgtaatgccggggctctaacccgccgccgcgaaattcgtgatgctgcaactctgctacgtctggggctggcttacggccccggggggatgtcattacgtgaagtcactgcatgggctcagctccatgacgttgcaacattatctgacgtggctctcctgaagcggctgcggaatgccgccgactggtttggcatacttgccgcacaaacacttgctgtacgcgccgcagttacgggttgtacaagcggaaagagattgcgtcttgtcgatggaacagcaatcagtgcgcccgggggcggcagcgctgaatggcgactacatatgggatatgatcctcatacctgtcagttcactgattttgagctaaccgacagcagagacgctgaacggctggaccgatttgcgcaaacggcagacgagatacgcattgctgaccggggattcggttcgcgtcccgaatgtatccgctcacttgcttttggagaagctgattatatcgtccgggttcactggcgaggattgcgctggttaactgcagaaggaatgcgctttgacatgatgggttttctgcgcgggctggattgcggtaagaacggtgaaaccactgtaatgataggcaattcaggtaataaaaaagccggagctccctttccggcacgtctcattgccgtatcacttcctcccgaaaaagcattaatcagtaaaacccgactgctcagcgagaatcgtcgaaaaggacgagtagttcaggcggaaacgctggaagcagcgggccatgtgctattgctaacatcattaccggaagatgaatattcagcagagcaagtggctgattgttaccgtctgcgatggcaaattgaactggcttttaagcggctcaaaagtttgctgcacctggatgctttgcgtgcaaaggaacctgaactcgcgaaagcgtggatatttgctaatctactcgccgcatttttaattgacgacataatccagccatcgctggatttccccccagaagtgccggatccgaaaagaagaactaactcgttgtggagaataacaaaaatggtcatctggagcttacaggtggccattcgtggggacagtatccctgacagcctacaaaacgcaattgaagaacgcgaggcatcgtcttaaacgaggcaccgaggcgtcgcattcttcagatggttcaacccttaagttagcgcttatgggagcaatccccgcatatccggttgtcaggtcaggatggtaaggcacctgctttacactttcgcccgtggtcagtgatggctgcgggcgaatcgtaccagatgttgtcaattaatcgtgttggcacagcgttatgactatcttttcttttatctgccagtgcacagcaaacatctcattctcacgatgaatgatgacctgctgtttattccagctaattatctgatagtccagaaaacctgcatcagtttggatctcacttgccttaaatgcgctctctttggcggaaaatgccagtgtcagcgccagagaaaaggctaaaccgcagtctgcgagtcgctcgtgttctgctggtgtaataatgttgtctgtcaattcggtcgctgtttgcgcagaaaaaatttcttcgatatcaacgccaatcggttgacgggaaaccacggccaatgccgtagccccgcagtggctaatactgccgtatacctccgcaggccacaccggttggcgtagctcgccgattgcgggcacacatttatagccatattcccgcaaagcataaacagcagcgatccgtccggctaaatgctctgttttacgtttacgtccagcgtgttgcagttgtgcgtagtgcggcagccagagtaaatcctgctcacaaaaattcgccggatcgaactcaacaaaatgcagcgtatgtccggcaaaggggagggaggtatgcgtagttttcatatcgaccatattcgagactgatgacaaacgcaaaactgcctgatgcgctacgcttatcaggcctacatggtcctgcaatatattgaattggcaagattttggtaggccggataaggcgttcacgccgcatccggcatgaacgacgcgcactttgtcaacaatctgacgttagcatcagaagtgagtgtttacgctcatataccacgtacgtcccggctcgttataggtatacgccccggcaccggcgatatagttggcccctgccaaatcgcccgtggtctgggcattacccgcacgccacaaacgtttgtcgaacagattgtccacgccgccggtcagactgacattcttcgtcacatcccaggtcgcgctcaggccaacaatgctgtaaggactaatttctttggtttccggtccaaccgctggctgacctttatagttgtacttcttcggctgctgcttgccgtaccaggtgaaggtcgtttgcatcgacaaatcttcccgtgcctgccagctcagcgttgagttcaacgtatactccgggatgatcgacaaacggtcgcccgtggttttgttttcactcttcagcatataagtgatgttattggtccacatcaccgtttcgctaaccggtacgtttaacgatccttccagaccttcaaccaccgctttcggcacgttatcccactgatagagatcggtgccgactgcgttttgccctacagccacatagcccgcttcaatcttattgcgataatcgttacggaaccaggtgacgcccgccagccagccgtcgcgtttgaactccagaccaatctctttgttgatgctggtttctgctttcaggtcatcgttaccttgcagatagcagccgcccgcgctggcatagcaaccctgacctttactgtagagaatgtagttcgggttagtctggtacaggctcggcgctttataagcacgggcgatgcccattttcagcgtgaagtcatcgcctaaaccttgcgatatgttcagcgccgggctccagttattgccgacaatactgtgatgatcgaaacgcagccccggcgttacgatggtgctgtcagtcagctccatgttgttttcggcaaacagcgagaaaatttctgcttttgaatacgggctacggtcggtggcactcacgccatcaatagcgccaccggtattcgttccggtcagtgcctgggtgttggaacttaagtccttcatccgttgctgattccactccgtacccagcgtcagcgtctggttaacgaggaaatcaatcggcaggttaacttcgctgtgcagcatcacgtcatcaagatcgatatcgacgaaatcctgtgtcgctttttcgttaaatttcccttcggtaccgcccgccagaccttccggaatacgcgagttacgggtgtgttcgtactgcacccagttgctggtggtcacgccgttatcccagccaccgttccaggtcagcgcgtagttctggcgatacagacggttggtttcatcgccatatttcgagcgggtataggaatcggagttggtattctgggtgtcgcccgcatacaggttaccctggcggctgtaacctgcttccagttccagcgattgcaatggcgcgaaatcccagcgcaccacgccattaatatctttgttgattaccccttcgcgcccggctggtaacgtcgtggcatacgttccggcacgcgcggactgatggccctggttgatatcccacgcgtcagcctgggttttgtcgaggttgccatacaaacggaagctgaattcgtcgcccagcggaccggtcaggctaaagttagtgcgtttggtggcaccttcctctttatgttctggcgcattgaaatatgcgtcccaggagccgtgccactcgccgctgccttttttggtaatgatgttaaccacgccgcccgccgcgccgttgccataacgcgcagctgccggaccacgcagaacttcaatacgttcaatcatttcaggtggcacccaggaagtatcaccacgggtatcgcgctcgccacgccagccctgacgcaccgagttacggctgcttaccggcttgccgtcaatcaaaatcagcgtgttttccggacccataccgcgaatatcaatctgtcggttattcccacgctgaccactggtggagttaccggtcaggttaacgcctggcatggtacggatgatctccgacacatcgcgggcaaccgggtttttgcggatttcatctgcggtgatggtcgaaacgccaggcgcctgtaagttctgctcggcggcggtaacgacaatagtatcgtcatgtgaaacaggagtatcggtcggctcttgtgcctgcgctaccccataaatccccagattgaccaacaaggccagggaatgaatcttcttgttcattgttttattcctgcatttttgccacgaattgcaactgtcgggcatggtcgtcatcaacacgacgcatcccgctaccgcgaaaacctttgatcctgaaagacacgcagtgcagttggttaattaatgtccgcgcttcccacggcgcgccattacgctattgcaaatgcaaatagttatcaataatattatcaatatatttctgcaatcaatgaaaaattgcacagtaaacatggggttatggtgtgacggcgttaaaagtaggaagtgagagctggtggcagtcgaaacatggcccggaatggcagcgtctgaatgacgaaatgtttgaggtcactttctggtggcgtgatccccaaggttctgaagaatactcgacgataaagcgcgtatgggtctacatcactggtgtgaccgatcaccatcagaacagccagccccagtcgatgcagcgaattgcaggcactaacgtctggcagtggaagacacaactcaatgccaactggcgcggcagctactgctttattcccaccgaacgcgatgacattttttctgtaccatcccccgatcgcctcgaattgcgcgaaggctggcgaaaactattaccccaggcgatagccgatccgctgaacctacaaagctggaaaggcgggcgagggcacgctgtttctgcactcgaaatgccgcaagcgcctctgcaaccgggatgggattgtccgcaagcgccagaaatacctgccaaagaaattatctggaaaagtgaacggttgaaaaagtcacggcgtgtatggatttttaccaccggcgatgcaacagcagaagaacgcccgctggcagttttgctcgatggcgaattttgggcgcaaagtatgcccgtctggccagtgctgacttcgctgacccatcgtcagcaacttcctcccgccgtgtatgtgttgatcgacgctatcgacaccacgcaccgcgcccacgaactgccgtgtaatgcggatttctggctcgcagtacagcaagagttattacccctggtgaaagctattgccccttttagcgatcgtgccgatcgcaccgtggttgccgggcagagttttggtgggctttccgcgctgtatgccggactgcactggcctgaacgctttggctgtgtattaagccagtcaggatcgtactggtggccgcatcggggcgggcagcaagagggcgtgttacttgaaaagctaaaagctggtgaagttagcgccgaaggtctgcgcattgtgctggaagcgggtattcgcgagccgatgatcatgcgggccaatcaggcgctgtatgcgcaattacaccccataaaagaatccattttctggcgtcaggttgacggcggacatgatgcgctttgttggcgcggtggcttgatgcaggggctaatcgacctctggcaaccacttttccatgacaggagttgaatatggcattcagtaatcccttcgatgatccgcagggagcgttttacatattgcgcaatgggcaggggcaattcagtctgtggccgcaacaatgcgtcttaccggcaggctgggacattgtgtgtcagccgcagtcacaggcgtcctgccagcagtggctggaagcccactggcgtactctgacaccgacgaattttacccagttgcaggaggcacaatgagccagcatttacctttggtcgccgcacagcccggcatctggatggcagaaaaactgtcagaattaccctccgcctggagcgtggcgcattacgttgagttaaccggagaggttgattcgccattactggcccgcgcggtggttgccggactagcgcaagcagatacgctgcggatgcgttttacggaagataacggcgaagtctggcagtgggtcgatgatgcgctgacgttcgaactgccagaaattatcgacctacgaaccaacattgatccgcacggtactgcgcaggcattaatgcaggcggatttgcaacaagatctgcgcgtcgatagcggtaaaccactggtctttcatcagctgatacaggtggcggataaccgctggtactggtatcagcgttatcaccatttgctggtcgatggctttagtttcccggccattacccgccagatcgccaatatttactgcacatggctgcgtggcgaaccaacgcctgcttcgccatttacgcctttcgctgatgtagtggaagagtaccagcaataccgcgaaagcgaagcctggcagcgtgatgcggcattctgggcagaacagcgtcgtcaactgccgccgcccgcgtcactttctccggcacctttaccggggcgcagcgcctcggcagatattctgcgcctgaaactggaatttaccgacggggaattccgccagctggctacgcaactttcaggtgtgcagcgtaccgatttagcccttgcgctggcagccttgtggctggggcgattgtgcaatcgtatggactacgccgccggatttatctttatgcgtcgactgggctcggcggcgctgacggctaccggacccgtgctcaacgttttgccgttgggtattcacattgcggcgcaagaaacgctgccggaactggcaacccgactggcagcacaactgaaaaaaatgcgtcgtcatcaacgttacgatgccgaacaaattgtccgtgacagcgggcgagcggcaggtgatgaaccgctgtttggtccggtactcaatatcaaggtatttgattaccaactggatattcctgatgttcaggcgcaaacccataccctggcaaccggtccggttaatgaccttgaactggccctgttcccggatgtacacggtgatttgagtattgagatcctcgccaataaacagcgttacgatgagccaacgttaatccagcatgctgaacgcctgaaaatgctgattgcccagttcgccgcggatccggcgctgttgtgcggcgatgtcgatattatgctgccaggtgagtatgcgcagctggcgcagctcaacgccactcaggttgagattccagaaaccacgcttagcgcgctggtggcagaacaagcggcaaaaacaccggatgctccggcgctggcagatgcgcgttacctgttcagctatcgggaaatgcgcgagcaggtggtggcgctggcgaatctgctgcgtgagcgcggcgttaaaccaggggacagcgtggcggtggcactaccgcgctcggtctttttgaccctggcactccatgcgatagttgaagctggagcggcctggctaccgctggataccggctatccggacgatcgcctgaaaatgatgctggaagatgcgcgtccgtcgctgttaattaccaccgacgatcaactgccgcgctttagcgatgttcccaatttaacaagcctttgctataacgccccgcttacaccgcagggcagtgcgccgctgcaactttcacaaccgcatcacacggcttatatcatctttacctctggctccaccggcaggccgaaaggggtaatggtcgggcagacggctatcgtcaaccgcctgctttggatgcaaaatcattatccgcttacaggcgaagatgtcgttgcccaaaaaacgccgtgcagttttgatgtctcggtgtgggagtttttctggccgtttatcgcaggggcaaaactggtgatggctgaaccggaagcgcaccgcgacccgctcgctatgcagcaattctttgccgaatatggcgtaacgaccacgcactttgtgccgtcgatgctggcggcatttgttgcctcgctgacgccgcaaaccgctcgccagagttgcgcgacgttgaaacaggttttctgtagtggtgaggccttaccggctgatttatgccgcgaatggcaacagttaactggcgcgccgttgcataatctatatggcccgacggaagcggcggtagatgtcagctggtatccggcttttggcgaggaactggcacaggtgcgcggcagcagtgtgccgattggttatccggtatggaatacgggtctgcgtattcttgatgcgatgatgcatccggtgccgccgggtgtggcgggtgatctctatctcactggcattcaactggcgcagggctatctcggacgccccgatctgaccgccagccgctttattgccgatccttttgccccaggtgaacggatgtaccgtaccggagacgttgcccgctggctggataacggcgcggtggagtacctcgggcgcagtgatgatcagctaaaaattcgcgggcagcgtatcgaactgggcgaaatcgatcgcgtgatgcaggcgctgccggatgtcgaacaagccgttacccacgcctgtgtgattaaccaggcggctgccaccggtggtgatgcgcgtcaattggtgggctatctggtgtcgcaatcgggcctgccgttggataccagcgcattgcaggcgcagcttcgtgaaacattgccaccacatatggtaccggtggttctgctgcaacttccacagttaccacttagcgccaacggcaagctggatcgcaaagccttgccgttgcctgaactgaaggcacaagcgccagggcgtgcgccgaaagcgggcagtgaaacgattatcgccgcggcattctcgtcgttgctggggtgtgacgtgcaggatgccgatgctgatttcttcgcgcttggcggtcattcgctactggcaatgaaactggcagcgcagttaagtcggcaggttgcccgccaggtgacgccggggcaagtgatggtcgcgtcaactgtcgccaaactggcaacgattattgatgctgaagaagacagcacccggcgtatgggattcgaaaccattctgccgttgcgtgaaggtaatggcccgacgctgttttgtttccatcctgcgtccggttttgcctggcagttcagcgtgctctcgcgttatctcgatccacaatggtcgattatcggcattcagtcaccgcgccccaatggccccatgcagacggcggcaaacctggatgaagtctgcgaagcgcatctggcaacgttacttgaacaacaaccgcatggcccttattacctgctggggtattcccttggcggtacgctggcgcagggtattgcggcgcgactgcgtgcccgtggcgaacaggtggcatttcttggcttgctggatacctggccgccagaaacgcaaaactggcaggaaaaagaagctaatggtctggacccggaagtgctggcggagattaaccgcgaacgcgaggccttcctggcggcacagcagggaagtacttcaacggagttgtttaccaccattgaaggcaactacgctgatgctgtgcgcctgctgacgactgctcatagcgtaccgtttgatggtaaagcgacgctgtttgttgctgaacgcacgcttcaggaaggtatgagccccgaacgcgcctggtcgccgtggatagccgagctggatatctatcgtcaggattgtgcgcatgtggatattatctctccagggacgtttgaaaaaattgggccgattattcgcgcaacgctaaacaggtaaattaatattatttataaacccataattacagaaaataattatggattttttatttgtttgatttataggtttgatgaatatttctcttaaatagagtgaatgttgcattcagtggaaggaatttacaaacttcagcttcggataattatcaccaactggtaaagtgagcgccgtggagatttccccctattggactcattttcaggttataccccatgtcatcactgaatattaaacagggaagtgacgctcattttcccgattatcctctggcgtcgcccagtaataatgaaattgatttacttaatctaatctcagttttatggcgggccaaaaaaacggtcatggcggtcgtttttgcgtttgcctgcgcaggcttgctgatctctttcatcctgccgcaaaaatggaccagcgcggcggttgtcacgcctccagaacctgttcagtggcaagagttggagaaatcattcactaagcttcgtgtgctggatctggatatcaaaattgatcgtacagaagcatttaacctgtttatcaagaagtttcagtcggttagcttgctggaagagtacctgcgttcatcaccttatgtgatggaccaattaaaagaggcgaaaatcgacgaactggatttgcatcgcgcaattgtcgcattgagcgaaaaaatgaaagcggttgatgacaatgccagtaagaaaaaagatgaaccgtcactgtatacctcctggacgctaagttttaccgcgccaaccagtgaagaggcgcagaccgttttgagcgggtatatcgattatatctctacgttggtggtgaaagagtcgctagaaaacgtccgtaataaactggagatcaaaacccagtttgaaaaagaaaaactggctcaggatcgcattaaaacgaaaaatcaacttgatgcaaacattcagcgcctcaattattcactcgacattgccaacgcggcaggaattaaaaagcccgtttacagtaatggtcaggccgttaaagatgaccccgatttttctatttctctcggtgcagacggtattgaacgcaaactggaaatagaaaaagcggtcactgacgttgcggaactgaacggtgaattacgtaatcggcagtatcttgtcgagcaattaacaaaagcacatgtcaacgatgtgaattttacgccgtttaaatatcagttaagcccgtcattgccagtgaaaaaagacggtccgggtaaggcgattattgtgatcctttccgcgttgatcggcgggatggtggcttgtggtggcgtgctgttgcgctatgcgatggcatccagaaaacaggatgccatgatggcagaccacttagtttaactatttgcggttgaaggtgccgttcgtccgagcggcaccacaagcggcgttccggcaactggatcgtcaatgatcatgcagcgcagaccataaatgcgctcaatcagttcagcagtgacaatctccttcggcgctccctgagcaacaattttcccttcccgcaatgcaatcaaatggctggcgtaacgacaggcctgattaagatcgtgcagcaccgccgccagggtatagcctttttcgcggttcagttcgcttaacaactccagcaaatcaatctgatgactgatatccagccaggtcgtgggttcgtcgagcagcataattgccgtttcctgggccagcaccatcgcgatccacgctcgctggcgttgtccgccagaaagggtatccacgctttgatctgccagatgagttattcccgtggcctgcatcgctttcgttaccgcttcttcatcttctttgcgccagcgggtaaacagcggttgatgcggataacgcccacgcgccaccagctcctgcacggtgatatcacccggcgtggtagcattttgcgccaacagaccaatccggcgtgcaacttctttactggcgtaatgttgaatgtgctcgccatccagccagacatgcccgtgagcaggcgtcatcaggcggcttaaggtacgcagcaacgtggatttaccgcagccatttggcccgataattgccgtgaagtgaccatcaggtatttctacagtcagattttccgcaacggtatatttgccatatcccagggttaactgttcgccgcgcaaacgggctactgattcggtcattttttgcgagactcctgaattaacaagacgataaggtaaataccgccgaggctgacggtaacgacgccaaccggaagttgatacggcataaacagttgttgggcgcagagatcggccgccagcagtaacagcgccccgcatagcgccgcctgggttagcccccagcgagcggtgccgctaatgcgtcgggcaatgtgcggcgcgactaaagcaataaaggaaatcggcccggcaagcgccgttgccgcagcggtaagcaccactgcaaccagcatcattaacagacgcgaacgttcgacgctgacgcccagcgcgcaggcggtatcatcgcccatctccagcaagcgcattcgccgcaccagcaaggtggcggcaatgagcatcaatataatgatgggtgcggaaggcgaggtttttgcccacgtcaggccgttgagcgatccggcattccacaaacccgctgttagcgccgtttctaaagacgctttcagcaacagccaggtattaaaggccaccagcatggcgcgaacaccgataccgataataatcaaccgaaaggtgtcgatgccgttacgccaggcgagcagccagaccagaagcgaagtgacaatgccgcccaccattgctgacagcgcgatagccgtcaggtcctgaccaaacagcaccatcgccaccagcacgccgctccacgccccggtgttaaagcccattacgtcagggctgccgagcgggttacgcatcagcgactgaaaaatcgcgccactgacgcccagtgctgcgccaatcaacagcgccatcagcacgcgtggtaaacgccattcggtgaccaccatcgtcatactgcgcggcgcatcgcccatcagcgcggcgaatacctgcgaggtttccagcgtgacggcaccgctgcgtaatccccagatacctgcaaccacacaggcggaaaccagcagcaaacaggtgatgagtaatcggcgagagacgtaaatcatgcaccacctcgcgttttacgtcgcacgaggaagatcagcaccggtgcaccaataaacgcactgaccacagaaacgcgcagttcgccgggcacaatcacccgcccgatgatatcggcaaacagcagcagggcaggggtagcaagtagcgtgacgggcagcgaccagcgatgatcggcacccaccagccaacgcgccatatgcggcatcatcaggccaataaaggcaatcgggccaactattgccgtcgcactaccacaaagcacggtaatcgccagcagaccaatcaactgtgtgcgcgccacgcgactgcccagcgccgtcgcggtgtcgctgccgaggctcaaactgttcagcgcgcgactcagtaatagcgcagttgctccggcgatcagcaccgggatcagcaccacttttaaggtatgtagattgcgaatatccagcgaaccggcttgccagaaacgcaactgatcgtagacgtcaggattaagcagggcgatgccgctggtcagtccttccagcaccgccgccagcgccacgcccgccagggttaaacgcaccggacttaactgcccgccgccctgactgccggtaaaggcaacaatcaatgaggccaccagcgccccggcgaaggccatcgccagttgttcctgcgcggaagagtaaccaaacagcgccgcacccagcacaatggcaaagctggctccggcgttcacgccaagcaagccggggtcggcaagtgggtttcgggtgagggtttgcattaacgccccggcaaggccaagcgcgccgcctgccagtaaaccggcaagggtacgcggcagccgcgcgtcgagcacgatggtgcagtcggcgctctggcaggtgccggagaaggcctccagcactacggaagcggggagtgattttgccccaatgagcaggcttaatgccgtcgcgataatcagtaataacagcaatccgggcacggcaatggcgcgtgtcacggcaacagaaccagacatacgaacttccatgataatgaaattaattatcgttatcgatcttatttggatatgttagcatgtgcagcctaagaataggtatttaaaatatttgatggcaaggcattgtaatgaataaacaatcctggctgcttaacctcagcctgttgaaaacgcacccggcgtttcgcgcagtattcctcgctcgtttcatctcaattgtgtctctgggtttgctcggcgtcgcggtgccggtgcagatccagatgatgacacattccacctggcaggtggggctttcggtgacgctgaccggcggcgcgatgtttgttggcctgatggtcggcggtgtgctggcggatcgctatgagcgcaaaaaagtgattttgctggcgcgcggcacctgtggcattggcttcattggactgtgccttaatgcactgctgccggagccgtcattgctggcaatctatttacttggtttatgggatggttttttcgcatcgcttggcgttacggcgctattggcggcgacaccagcactggtagggcgtgaaaacttaatgcaggccggggcgatcaccatgttgaccgtgcgtctggggtcggtgatttcgcccatgattggcggtttattgctggcgaccggtggcgtagcctggaactacgggctggcggcggcgggcacgtttattaccttgctaccgttgttaagccttccggcgttgccaccgccaccgcagccgcgtgagcatccgttgaaatcattactggcaggatttcgttttctgctcgccagcccgctggtaggagggattgcgttgctgggtggtttattgacgatggcgagcgcggtgcgggtactgtatccggcgctggctgacaactggcagatgtcggcggcacagattggttttctctatgcggcgatcccgctcggcgcggctattggcgcgttaaccagcgggaagctggcgcatagcgcgcgaccagggttattgatgctgctctccacgctgggatcgttcctcgccattggtctgtttggcctgatgccgatgtggattttaggcgtggtttgtctggcgctgttcggctggttgagtgcggtcagctcgttgctgcaatacacaatgctgcaaacgcaaaccccggaagcgatgttagggcggattaacggtttgtggacggcacaaaacgtgacgggcgatgccataggcgcggcgctgctgggcggtttgggagcgatgatgacaccggttgcttccgcaagcgcgagcggttttggtttgttgattatcggcgtgttgttattgctggtgctggtggagttgcgacgttttcgccagacgccgccgcaggtgacagcgtctgacggttaatgcttaaaacagcgccttaagtcgttccagcacttgcatggcgctgtagtaatccaggcggaacgtctcggttcccagcgcataaacctgcttgttttgtactgcaggcaggtgcgcgagcagcggattagcataaatagcatcggcgtctttctgatcaccggcgaacaggaatagcgattcaccgtttaacccagcagccagattttccccaccaagctgaatgatgtcatggcgtttgccctggctttggctggcgtttaaccctgcgggcaacttcgccagcgtaaagccgagttgttccagcatctgcccttgtgctgattccggcgtccagagattggcactgtgtgcagcggcggtatagacaatggcagtgaccggctgcggcggtaatttgatttgctctttcgccgctgccagttgcttatcaaactgtgcaatccgctctgccgcttgtttctcatgaccggtaatttcgccaagctgcgttaacagcgactgccagcttttgtcgtcgtaattgatgattaatgtcggggcgatggtggaaagctgatcatacagcgccagcgccgaatccccgccggttgcgctaattaaaatcagatccggcatttgcgcggcaacggcttcggcgctcggttcgccgatatagagccgttgcagtttgcgttcgttcgccaccttgctccactggcgtaaaaagccctggtcatccgcgacgcggttattcggcgtggtcgcgccgctggcgatcaccggagcatcaatcgccagcagtgagccagtcagggtgacgctggtggaaacaatacgctgcggctggctttccagggtatgagtgccccggctgtcagtaatctgacgcggccagtcggcagcctgaactgcggctattcctgaaagcaaaagtcctgttaatagaagggcgttgcggtagagcggggcgagtctcacaagtcagcttcctgttattaatgaagttaatgcttctcattttcattgtaaccacaaccagatgcaaccccgagttgcagattgcgttacctcaagagttgacatagtgcgcgtttgcttttaggttagcgaccgaaaatataaatgataatcattattaaagcctttatcattttgtggaggatgatatggatacgtcactggctgaggaagtacagcagaccatggcaacacttgcgcccaatcgctttttctttatgtcgccgtaccgcagttttacgacgtcaggatgtttcgcccgcttcgatgaaccggctgtgaacggggattcgcccgacagtcccttccagcaaaaactcgccgcgctgtttgccgatgccaaagcgcagggcatcaaaaatccggtgatggtcggggcgattcccttcgatccacgtcagccttcgtcgctgtatattcccgaatcctggcagtcgttctcccgccaggaaaaacagacctcagcccgccgttttacccgcagccagtcgctgaacgtggtggaacgccaggcaattcctgaacaaaccacgtttgaacagatggttgcccgcgccgccgcacttaccgccacgccgcaggtcgacaaagtggtgttgtcacgattgattgatatcaccactgacgccgccattgatagtggcgtattgctggaacggttgattgcgcaaaacccggttagttacaacttccatgtcccgctggctgatggtggcgtgctgctgggggccagcccggaactgctgctacgtaaagacggcgagcgttttagctccattccgttagccggttccgcgcgtcgtcagccggatgaagtgctcgatcgcgaagcgggtaatcgtctactggcgtcagaaaaagatcgccatgaacatgaactggtgactcaggcgatgaaagaggtactgcgcgaacgcagtagtgagttacacgttccttcttctccacagctgatcaccacgccgacgctgtggcatctcgcaactccctttgaaggtaaagcgaattcgcaagaaaacgcactgactctggcctgtctgctgcatccgacccccgcgctgagcggtttcccgcatcaggccgcgacccaggttattgctgaactggaaccgttcgaccgcgaactgtttggcggcattgtgggttggtgtgacagcgaaggtaacggcgaatgggtggtgaccatccgctgcgcgaagctgcgggaaaatcaggtgcgtctgtttgccggagcggggattgtgcctgcgtcgtcaccgttgggtgagtggcgcgaaacaggcgtcaaactttctaccatgttgaacgtttttggattgcattaaggagcgaggatgagcattccattcacccgctggccggaagagtttgcccgtcgctatcgggaaaaaggctactggcaggatttgccactgaccgacattctgactcgccacgctgcgagtgatagcatcgcggttatcgacggcgagcggcagttgagttatcgggagctgaatcaggcggcggataacctcgcgtgtagtttacgccgtcagggcattaaacctggtgaaaccgcgctggtacaactgggtaacgtcgctgaattgtatattacctttttcgcgctgctgaaactgggcgttgcgccggtgctggcgctgttcagccatcagcgtagtgaactgaacgcctatgccagccagattgaacccgcattgctgattgccgatcgccaacatgcgctgtttagcggggatgatttcctcaatactttcgtcacagaacattcctccattcgtgtggtgcaactgcacaacgacagcggtgagcataacttgcaggatgcgattaaccatccggctgaggattttactgccacgccatcacctgctgatgaagtggcctatttccagctttccggcggcaccaccggcacaccgaaactgatcccgcgcactcataacgactactactacagcgtgcgtcgtagcgtcgagatttgtcagttcacacaacagacacgctacctgtgcgcgatcccggcggctcataactacgccatgagttcgccgggatcgctgggcgtctttcttgccggaggaacggttgttctggcggccgatcccagcgccacgctttgcttcccattgattgaaaaacatcaggtgaacgtcaccgcgctggtgccaccggcagtcagcctgtggttgcaggcgctgaccgaaggtgaaagccgggcgcagcttgcctcgctgaaactgttacaggtcggcggcgcacgtctttcagccacccttgcggcgcgtattcccgctgagattggctgcctgttgcagcaggtgtttggcatggcggaagggctggtgaactacacccgacttgatgatagcgcggagaaaattatccatacccagggttacccaatgtgtccggatgacgaagtatgggttgccgatgccgaaggaaatccactgccgcaaggggaagtcggacgcctgatgacgcgcgggccgtacaccttccgcggctattacaaaagtccacagcacaatgccagcgcctttgatgccaacggtttttactgttccggcgatctgatctctattgatccagagggttacatcaccgtgcaggggcgcgagaaagatcagatcaaccgtggcggcgagaagatcgctgccgaagagatcgaaaacctgctgctgcgccatccggcggtgatctatgccgcactggtgagcatggaagatgagctgatgggcgaaaaaagctgtgcttatctggtggtaaaagagccgctgcgcgcggtgcaggtgcgtcgtttcctgcgtgaacagggtattgccgaatttaaattaccggatcgcgtggagtgtgtggattcacttccgctgacggcggtcgggaaagtcgataaaaaacaattacgtcagtggctggcgtcacgcgcatcagcctgaaggagagaacacgatggctattccaaaattacaggcttacgcactgccgaagtctcacgatattccgcagaataaagtcgactgggcctttgaaccgcaacgtgccgcgttgttaatccatgatatgcaggactattttgtcagcttctggggcgagaactgcccgatgatggagcaagtgatcgcgaatattgcggcactacgcgactactgcaaacagcacaatatcccggtttattacaccgcccagccgaaagagcagagcgatgaagatcgggcgctgttgaatgatatgtgggggccaggcctgacccgttcgccggaacagcaaaaggtggtggatcgcctgacgccagatgccgacgacacggtgctggtgaagtggcgctacagcgcgtttcatcgttctccgctggagcaaatgctcaaagagagtggacgtaaccagctgattattaccggggtatatgcccacattggttgtatgaccaccgcaaccgacgcatttatgcgcgatattaaaccgtttatggtggcagatgcgctggccgatttcagccgtgacgagcatttgatgtcgctgaaatatgtggccggacgttctggccgggtggtgatgaccgaagaattgctgccagcacctatccccgccagcaaagcggcgctgcgtgaggtgatcctgccgttgctggacgagtccgatgaaccgttcgatgacgacaacctgatcgactacggtctggattcggtgcgcatgatggcgctggcggcgcgctggcgcaaagtgcatggcgatatcgactttgtcatgctggcgaaaaacccgaccatcgacgcatggtggaagctactctcccgcgaggtgaaataatggatttcagcggtaaaaatgtctgggtaaccggcgcaggtaaaggtatcggctacgccacggcgctggcgtttgttgaggcgggagcgaaagttacaggttttgatcaagcgttcactcaggagcaatatccctttgcgaccgaagtaatggatgttgccgacgccgggcaggtggcgcaggtatgtcagcgactgttagctgaaacggagcgactggacgtgctgatcaatgcggcgggaattttgcgcatgggcgcgaccgatcagctcagtaaagaggactggcagcagacttttgcggttaacgtcggcggtgcgtttaacctgttccagcaaaccatgaaccagtttcgccgtcagcggggcggggcgattgtcactgtggcgtccgacgccgcacacacgccgcgtattggtatgagtgcttatggcgcatcgaaagcggcgctgaaaagcctggcgttgagcgtcgggctggaactggcgggtagcggcgtgcgctgtaatgtggtttcgcctggctccaccgacaccgatatgcaacgcacgctgtgggtgagcgatgacgccgaagaacagcgtattcgcggctttggcgagcagtttaaactcggcattccgctggggaaaatcgcccgtccacaagagattgccaacacgattttgttcctcgcctctgacctcgccagccatatcaccctacaggatattgtggtcgatggcggctcaacgctgggggcataagcatgatctggaaacgccatttaacgctcgacgaactgaacgccaccagcgataacacaatggtggcgcatctgggaattgtgtatacccgtctgggagatgatgtgctggaagccgaaatgccggttgatacccgtactcatcagccgtttggcctgctgcatggcggcgcgtcggcggcgctggctgaaacgctgggatcgatggccggatttatgatgacccgtgacgggcagtgtgtggtgggtacggaacttaacgccacccatcatcgcccggtgtctgaaggcaaggtacgcggcgtctgccagccgctgcatcttgggcggcaaaatcagagctgggaaatcgtcgttttcgatgaacaggggcggcgttgctgcacttgtcggctgggtacggcagttttgggatgagcccgacagaattaaatgagattgcaggaaaactcggttaacggagtgatcgagttaacattgttaagttaaatattggtttcaactccgatttacatggttaccgtgttgttaaatcgtacaaagatgttatagaaacaaaatgtaacatctctatggacacgcacacggataacaactatgaacaaatcagggaaatacctcgtctggacagtgctctctgtaatgggagcatttgctctgggatacattgctttaaatcgtggggaacagatcaacgcgctgtggattgtggtggcgtcggtctgtatctatctgatcgcttaccgtttttatgggctgtatatcgccaaaaatgtgctggcggttgacccgacgcgtatgacgccagcggtgcgccataacgacgggctggactatgtgccgacggacaagaaagtgctgttcggtcaccattttgcggccattgccggagcaggtccgttggttgggccggtactggcggcgcaaatgggttacctgccagggatgatctggctgctcgccggggtggttctcgctggtgcggtgcaggatttcatggtgctgtttgtttctacgcgccgtgacggtcgatcgctgggtgagctggtcaaagaagagatggggccaactgccggggtgattgcgctggtagcctgctttatgatcatggtcattatccttgcagtactggcgatgatcgtggtgaaagccctgactcatagcccgtggggaacgtataccgttgcgttcaccattccgctggcgatttttatgggaatctacctgcgctatctgcgtccgggccgcattggcgaagtgtcagtgattggcctggtgttcctgattttcgccattatctctggcggctgggtggcagaaagtccgacctgggcaccgtactttgactttaccggcgtgcagctgacctggatgctggtgggctacggttttgtggcggcggtgctgccggtgtggttgctgctggccccgcgtgactatctctcgaccttcctgaaaatcgggactatcgtcggtctggcggtaggcattttgattatgcgcccgacgctgaccatgcctgcgctgaccaaatttgtcgatggcactggcccggtatggaccggtaacctgttcccgttcctgtttatcaccatcgcctgtggtgcggtgtctggcttccatgcgctgatctcttccggcaccacgccgaagatgctggcgaacgaagggcaggcgtgctttatcggctacggtgggatgttgatggaatccttcgtggcgattatggcgctggtttctgcctgtatcatcgatccgggcgtgtattttgccatgaacagcccaatggcggtactggctccggcagggacggcggatgtagtcgcttctgccgcgcaggtggtgagtagctggggctttagcattacaccagatacgctcaaccagattgccagcgaagtgggtgaacagtcgatcatttcccgtgcgggcggtgcgccgacgctggcggtggggatggcttacatcctgcacggtgcgctgggtggtatgatggatgtggcgttctggtatcacttcgccattctgtttgaagctctgtttattctgacggcggtagatgcgggtacgcgtgctgcgcgctttatgttgcaggatctgctgggcgtggtgtctcctggcctgaagcggaccgattcactgcctgctaacctgctggcaacagcgctgtgcgtactggcgtggggctacttcctccatcagggcgtggtcgatccgctgggcggtattaacactctgtggccgctgtttggtattgccaaccagatgctggcagggatggcgctgatgctctgtgccgtggtgttgttcaagatgaaacgtcaacgttacgcctgggtggcgctggtaccaacggcctggctgctgatttgtaccctgaccgcaggctggcagaaagcgtttagcccggatgcgaaagtcggcttcctggccattgctaataagttccaggcaatgatcgacagcggcaatattccgtcgcagtatactgagtcacagctggcgcaactggtgttcaacaaccgtctggatgccgggttaaccatcttctttatggtggtcgtggtggttctggcactgttctcgattaagacggcacttgcggcattgaaagatccgaagccaacggcgaaagaaacgccgtatgaaccaatgccggaaaatgtcgaggagatcgtggcgcaggcaaaaggcgcacactaaagtcagagtgagggggggatgttggcgaatgttggcttagtgcccagggttccctctcaccctaaccctctccccggtggggcgaggggactgaccgagcgcgttgatagcatttgtaggccggataaggcgttcacgccgcatccggcactctttcagcaacatggttagcggaggccaagatgtttgattcactggcaaaagccggaaaatatttaggtcaggcggcgaagctgatgattggtatgcctgattacgacaactatgtcgaacatatgcgggttaaccatcccgatcaaacgccgatgacctacgaagagtttttccgtgagcggcaggacgcgcgctacggtggaaaaggcggcgcgcgctgctgctaaatttgtacgtcaggctttaaacgattccacttttttgaacgctgcacgcaacgtatctggtgtcagcgtgactggcaggtaatgaatggactccaccggacgcagggtgtgggcaatcactttgtcgatctccgcctgattattgatatccacttccagctccgccagtgtagtcggcagatgaaaacgctgatacgctccagttaattgcgccagcacatcatcctgacccagcaaggcgctttgcaccagaattccgtaggcgactttggtgccgtggagaaacttctcggtttgcggcagcacggtcagaccgttatgcacggcatgagctgccgccacacgcgtaaaacgatcgcccagaccaccaaccatcccaccaccagcaataatagcatccaccacatcgcaaaatgattgcgttaactgttgattttgctgatcgctcagcgcctgttcgctactgtttaacaagacgtcgcgaatggcttgcgcattattgatccccagtcgcacggttagcggcaacgtttctggttgcggagccagcaccaccgcttcataccatttcgccagcgtgtcaccgatccccgccagcagatattgttgcggtgcattgaggataatctccggttccaccagcaccataaaattggcgtcgtcgaaaatctcataatgcagcgcctgtccggcatcattataccagacggagagcggtgtccaggcggcgcaggtggcggcgatcgtcggaacggcaacaaacggcagaccgagacggcgggcgagggctttcgcggtgtcgagcagtgcgccgccgccgacgccaatcaccacgctgcgatcgtcaccggactcagccgccagttgctgtacatcgctttcgctgcaatgaccacgaaacaaaatatgctttgcccctggaagtccaaacgctggcggaagtttggtttgcgccgcagcaatggcgcgtttgccgtagatccacaccgcgcgagaaagttgttcatcagtgaaaaaatcgtgcaggtgattgaaacttcctggatgtgaaaagtagttagccgggccgacgaccacgcggataggattgtgaggcatgttgtgttgtccttattgttttatttagacatctaaacgtcttgattgccaaatactagcatcgtgttatagtgccttcaacacgcaacttcgtcaggtacaataaaaatgacaaataaccctctgattccacaaagcaaacttccacaacttggcaccactattttcacccagatgagcgcgctggcgcagcaacaccaggcgattaacctgtcgcaaggctttcctgattttgatggtccgcgctatttacaggagcggctggcgtaccacgttgcccagggggcaaaccaatacgcgcccatgaccggcgtgcaggccttgcgcgaggcgattgctcagaaaacggaacgtttgtatggctatcaaccagatgccgatagcgatatcaccgtaacggcaggggcgacggaagcgttatacgcggcgattaccgcactggtgcgcaatggcgatgaagtgatttgttttgatcccagctatgacagttactcccccgccatcgcgctttctgggggaatagtgaagcgtatggcactgcaaccaccgcattttcgcgttgactggcaggaatttgccgcattattaagcgagcgcaccagactggtgatcctcaacactccgcataatcccagtgcaactgtctggcagcaggctgatttcgccgctttgtggcaggcgatcgccgggcacgagatttttgtcattagcgatgaagtctacgagcacatcaacttttcacaacagggccatgccagtgtgctggcgcatccgcagctgcgtgagcgggcagtggcggtttcttcatttggcaagacctatcatatgaccggctggaaagtgggttattgtgttgcgccagcgcccatcagcgccgaaattcgcaaggtacatcagtatctgaccttttcggtgaataccccggcacagctggcgcttgctgatatgctacgtgcagaacctgagcattatcttgcgttaccggacttttatcgccagaagcgcgatattctggtgaatgctttaaatgaaagccggctggagattttaccgtgtgaaggtacatactttttgctggtggattacagcgccgtatctaccctggatgatgttgagttttgccagtggctgacgcaggagcacggcgtagcggcgattccgctgtcggtgttttgcgccgatcccttcccacataaactgattcgtctctgttttgccaagaaggaatcgacgttgctggcagcagctgaacgcctgcgccagctttagctatttaaccgtccaggcgcgggaatattgacggtcggcaaacaactcttgcaggccgttaatttgcttcaggcgcagcacttcgtcgctgtccattcccagctctttgccaattttattatcatcccatcccaactggctaagttcacggacgatttccgacatggcggtgatttgatggcgtccacgagcgcgattatgacgaatagtcgcggcgatgcgttgattacgcgtaccttccagacaggtcaccggcaaataaccttttaagcgtaattttaatgatgatgagcctttaccaatttcatggcggtgaaaaccatccacgatttccatggcatttttatccgtatgtgtgaccacaatgggttgggtaaaaccatctatttcaatggatttttgcagcagtttttttcgggtggtgccacgttgtttgggttgtaatcattaggcataagttggctgtttttaacccacagaacgcaatccactggctcttcacgaaaggggctaacctgatggatcgccatgcggatttcattaatcgctttgatgcgatcatcttccggcaagctggcgagaaattgcgttaaatcctgcgttaatcgttgttgcatagtatcccccattcctgacgttttccttttatccgttcgttataacgctgatagttcttcgattttgtggggctaaatgataatgcccgacaccagtaatcgttattgagtaaaactttgcatatccgccgccaggaggggatatctttcgcgccaatgtccccttgctgggtttgtggaacctcgatgccttttttctgataccagtgcaaataaatggcgattttattgcggtaatgctcagctgttttttccggcatgctattgagcagcaataatgcatattcttgccagtctaaatgttctggcttgaggattttccgatgcccatagaaatgattgtcatgtccggcgtaaatgccgccactttttaccccgctgactcgtgcgcacatagcagcccagcgatccggttcgataacgtgatagagccataatccttgtcgttgctccgggccaaaaggttcgcaaattcgcatatgacgcagaggaacgcctgcctgatacattaggttatacagtgggttgcagagactttgatgatttgcataccaggtccagatatcagccactttccagtcgtaaatggggtaaatgtaccagctatgaccgcctggtgcggccgtagtccagggtttatcgtcggcaaaacgttgtttatttaaactggcgatggcgacaaaacggttgtaggactcatccgcacggatgccgatcatcatcgccgccggacgtttttgtgaaaaccattcggcaaactcacgtacaaattgttcgaaggtcatgcctggctggtaaaaggagaaaaagtcagggtcggttatcgcatcttggggaggttgacgtacccattcgacatcaggttcccagcactgccattcgggttggtattgtgaaagggaattttgcgtcgtaagcgggagcgcaacccagtaaaactcttcgatgacatcggtgtacaactcgcgcagggactgaacatagttaatggtgcaagagaattgcgcctcccagtcgataaacaaaacgcagatttttttgcccatttgtcgggcaagttcggctgtcagatgcagcattaaaccagagtctttgccgccagaaaatgagacacaaacgcggggtagggtgttgagtgtccaggtaatacgctctcgtgcagcttccagaatattgagcggaagaggaattttataaatagacatctgaagacgctctctgaacgttacagggtgatcagtgagataagtctgttaattataaagtaaacactgtaaagcagagtgttttatttttcattcgcgccgtgaataaataggtgaaagttatagtagctttctgaagttatatatcaaaaacactcatttaggcggtcaataaatcgtgagaataccagattgtttaaagaagatttattataggaaatgtaaggctttattgaaggtaacggatcttccagttttatctcttttaaattaagaaagtcacggtaggaattataaagttcataggggactattcccagtaaatctgtaactgcaatgctattaatgattgtcagcaaagaggaaccacgaaatgagattttgcgattcataaatctctcgtctatttccatttgaatatcatcaacccctgctgatttagatattaattgggtgaactcttctgccataatttgttcataagtgctattgtcagtaattcgtggatgcctattactacaaattagagtattgcgaatcgtatgcaatggcatgcaaatgacggaacggctgatcactggcatttgggtgatcaccagatcggctttgcggtgaaccaacagttcttcagcattctctgctgacatgaggatatcatggcactcaatctcgacagaggaatcttgccgtaggcagcggatcagcatactattattagagcaagaaatgagctgagggccgtagataataaagtttttctttagttcggacttattgactatattaattgtttgttcaaggcctctgagatttttctcaagatggtgatgcagatttaaccctgttgtcgtcggcgcgataccttttcctgagcgaatgaataaagggtcattaaattgcgcacgtaagcgttgtaacgactggctcacggctgatggggtgatatatagtgattcagcagctttgctaatgcttaaatgctggtaaatacactcaaatatgacaagaagatttaagtcgaactttttcaagtcgtagagattggccatacactactccggttatatttttcttccatgatatattcacttaatcaatgttttttgcgtatatatttttattgattatgtttttttgcttaactcaggattaagtttttctaaaatagcacagccacttagggcagagcgagcaattcatgcttttttaggatggttgaaaagcagggatatagttcaaccatccatgaattatcttttatttattccccataatgatattaagcgttttctgatcgggcaaccccacggcctgttgtagcgtattttccttactcatgtaatagatagccggcgtgacatttgcccccagatcgtccatcagtttctcattgtcacttaacactttcatttgctctgtacttacgtttgcaggcacgtttagcttaagcttgccaccagaggcttcatattgttgccaggtttttgcgggatctttggaggcaagaattgccgctgctgtcgccgggctttctggcttgataaccccaaccaacaatgttcttaattgcactttgccagaatctacccacgggcgcgcctgctgccagaactgtttacaatatgggcagaacggatcggcgaagacgtagacaatgaccggcgcatcttttttaccgtcgaggagccagtgggattgttccatccgttgccacatttcgcgtccggctggtgcgtaaatttctttttcgataagtgtgttactcaggttttcacctttctcgttgtacatgtaaccagagatagcgtgcttaccatctggagtcaggtagatggtgacgcccatatcctgatactttccgagataacctttcattcctccgggggcatcgaatgttttgatgattgtaatgccctgtttttcaatcgcttttactggagcaggaagttcctctgcgaaggcgattgcaggaagcagagccagtaaaagtatcttttttaacattaatttgtccttttcagtcagtgcaaaagtcgagtaaaaggcataacctatcactgtcataggtaagagcttagatcaggtgattgccctttgtttatgagggtgttgtaatccatgtcgttgttgcatttgtaagggcaacacctcagcctgcaggcaggcactgaagataccaaagggtagttcagattacacggtcacctggaaagggggccattttactttttatcgccgctggcggtgcaaagttcacaaagttgtcttacgaaggttgtaaggtaaaacttatcgatttgataatggaaacgcattagccgaatcggcaaaaattggttaccttacatctcatcgaaaacacggaggaagtatagatgtccttgattaacaccaaaattaaaccttttaaaaaccaggcattcaaaaacggcgaattcatcgaaatcaccgaaaaagataccgaaggccgctggagcgtcttcttcttctacccggctgactttactttcgtatgcccgaccgaactgggtgacgttgctgaccactacgaagaactgcagaaactgggcgtagacgtatacgcagtatctaccgatactcacttcacccacaaagcatggcacagcagctctgaaaccatcgctaaaatcaaatatgcgatgatcggcgacccgactggcgccctgacccgtaacttcgacaacatgcgtgaagatgaaggtctggctgaccgtgcgaccttcgttgttgacccgcagggtatcatccaggcaatcgaagttaccgctgaaggcattggccgtgacgcgtctgacctgctgcgtaaaatcaaagcagcacagtacgtagcttctcacccaggtgaagtttgcccggctaaatggaaagaaggtgaagcaactctggctccgtctctggacctggttggtaaaatctaaatttccttcgtctttcacgccatagcggcgttggcgtcgcccgctcaccccggtcacttacttgtgtaagctcccggggattcacaggctagccgccttgctctgacgcgaaatacttcggaaattcacctaattcttcgggtgctgcggcacccgattttcttccccgcaccatgatgcaagctgcatccaggtagccgcagaggccgcttgcatgatgatgtttaaagcccaggagataaacatgctcgacacaaatatgaaaactcaactcaaggcttaccttgagaaattgaccaagcctgttgagttaattgccacgctggatgacagcgctaaatcggcagaaatcaaggaactgttggctgaaatcgcagaactgtcagacaaagtcacctttaaagaagataacagcttgccggtgcgtaagccgtctttcctgatcaccaacccaggttccaaccaggggccacgttttgcaggctccccgctgggccacgagttcacctcgctggtactggcgttgctgtggaccggtggtcatccgtcgaaagaagcgcagtctctgctggagcagattcgccatattgacggtgattttgaattcgaaacctattactcgctctcttgccacaactgcccggacgtggtgcaggcgctgaacctgatgagcgtactgaacccgcgcatcaagcacactgcaattgacggcggcaccttccagaacgaaatcaccgatcgcaacgtgatgggcgttccggcagtgttcgtaaacgggaaagagtttggtcagggccgcatgacgttgactgaaatcgttgccaaaattgatactggcgcggaaaaacgtgcggcagaagagctgaacaagcgtgatgcttatgacgtattaatcgtcggttccggcccggcgggtgcagcggcagcaatttactccgcacgtaaaggcatccgtaccggtctgatgggcgaacgttttggtggtcagatcctcgataccgttgatatcgaaaactacatttctgtaccgaagactgaagggcagaagctggcaggcgcactgaaagttcacgttgatgaatacgacgttgatgtgatcgacagccagagcgccagcaaactgatcccagcagcagttgaaggtggtctgcatcagattgaaacagcttctggcgcggtactgaaagcacgcagcattatcgtggcgaccggtgcaaaatggcgcaacatgaacgttccgggcgaagatcagtatcgcaccaaaggcgtgacctactgcccgcactgcgacggcccgctgtttaaaggtaaacgcgtagcggttatcggcggcggtaactccggcgtggaagcggcaattgacctggcggttatcgttgagcacgtaacgctgctggaatttgcgccagaaatgaaagccgaccaggttctgcaggacaaactgcgcagcctgaaaaacgtcgacattattctgaatgcgcaaaccacggaagtgaaaggcgacggcagcaaagtcgttggtctggaatatcgagatcgtgtcagcggcgatattcacaacatcgaactggccggtattttcgtccagattggtctgctgccgaacaccaactggctcgaaggcgcagtcgaacgtaaccgcatgggcgagattatcattgatgcgaaatgcgaaaccaacgtgaaaggcgtgttcgcagcgggtgactgtacgacggttccgtacaagcagatcatcatcgccactggcgaaggtgccaaagcctctctgagtgcttttgactacctgattcgcaccaaaactgcataagaagaagtaagattcacctgcaattgcttagccgccggggtcaaacctggcggcttttttatggcattaaaaagccccgccgggatggctccgggcagggcgggatacttattctggcaattaacgcacaaccagcaccggcagattggcgtggcggatcacgctcgaggcgttagaacctaacagatgggtcgaaatcgatgggttgcgagaaccaataactacaacatcagcccccagttcttctgccaactcattgacttcatcccgcacgctaccaaaacggacatgttgtttaatgcgggaaggatcgatggtgaagtggctgaccatcgtttgcagacgttcttgtgcttcatgttgcagatgctcttcaaaacgacgcacatcagcggcaaaacggtgcaggctcaggctggctgacccgggtagtacgtgaagtagatgaataactccgtcatcctgggcgaggaattcagcgtggcgaacagctttgtcgctcaattccatttcaaatacatcaactggcataatgattgtcttatacataaccctttctccctgttaatcatgaacaaatcattcgccatgattataatatttatccctgatatttgtctggttctttttccttacgaactgtttctgtgatgaatatattctcactgaacaccaggaattctcccaaaacctgtggtaccgcccgttttcccgctgtgatagctacccttaaagactgactcttttttgaactgtctctggaggttgcatgaaagcattgacttatcacggcccacatcacgttcaggtagaaaatgttcccgatccgggcgttgaacaggcagatgatattattctgcgtattacggcaacggcgatctgtggctctgacctccatctttatcgaggcaaaatacctcaggttaaacatggcgatatttttggtcatgaatttatgggggaagtagttgaaaccggaaaggacgtaaaaaatttgcaaaaaggcgaccgagtggtaattccgttcgtcattgcttgtggcgactgttttttctgtcgattgcaacaatatgccgcctgcgaaaataccaatgcgggtaaaggcgctgcgctcaataaaaaacagataccagctccagcggcattgtttggttatagtcacctgtatggcggcgttcctggtgggcaggcggaatatgtccgcgtccctaaagggaatgtggggccgtttaaagtaccgcctttgctttcagatgataaagcgcttttcctttctgatattctgccaacggcatggcaggcagcaaaaaatgcgcagatccaacaaggttcaagcgttgcagtctatggtgctggtcctgtgggattgttgacaatcgcctgtgcacggttgctcggtgcggaacagatttttgttgttgatcatcatccctaccgcttgcatttcgccgccgaccgctacggcgcgatcccgattaattttgatgaagacagcgatccggcacagtcaattattgaacaaacggcaggtcaccggggcgtggatgcagtaatagacgccgtcggttttgaagcgaaaggcagcaccacggaaacggtgctgactaacctgaaactggagggcagcagcggtaaagcgttgcgccagtgtattgcggcggtcaggcgtggcggcattgttagcgtacccggcgtctacgctggatttattcacggtttcctgtttggcgacgcctttgataaagggttgacgtttaaaatgggacagacccacgttcacgcatggctgggagaattattaccgttaattgagaaaggattactgaaaccagaagaaattgttacccactatatgccgtttgaagaggccgcccggggatatgagattttcgaaaaacgtgaagaggagtgccgtaaggtgattctggtacccggtgcacaaagcgcagaggcggcgcagaaggcggtttcaggtctggtgaatgcgatgccggggggaacaatatgatcgtcaggagtggttttcgaggtaaaggacagccatgacgataatcgccgccataatcagaaatcctatcaggatgtaaaatgcttctgccatggttattcccacaaacgaaacggaataattttgcagcaaaagtgaacagtgagaaccaggaaaaattgctgattttgcgtaaagaggatgcgagtgcatcctctgggcaaagcgagttatcgcttgtgcagatgggattaaagcaggtagtcgccagcagcttctggctggtattcgagttccagcacttcaaggtgggttgcaacgccgcccggaagttcccagtgaatggaatcgccaacgcgcagccccagcagtgcggcacctaccggagccataacggaaagctgagtattgctatcggtcatttttgccggatacaccagcgtgcgcacacgcacttcgccatcgctaagattgcggaatttaacccggctgttcattgtcaccacgtcgtgtggcatctcttctggcgaacacatttgggcgcgatccaactctgcgtttaacgcgtcggcgattggcaaaccagcataggcgggttgctccagcagaatatcgatgcgttcggcatccaggtcgttaatgatgatagttggtctggacatttttactccatgtcgtcggtactgcgagtgtcgcagataaacatacccaaaagaaaaccctcaccgtcaggcggcgagggtttaactcacatgatgatactgactgttgctcactctttgaagtgatttgcgtcacattcagggaattcctcaatgcagcgcattatgtataattcttaatcgtcatggttatggaagacgaattagcgtgttttgtaaatcagaggattaataacccgctttatcaatcacaaaggttttgccacagttacctgggtgaggttgtggcaagaatgagtttgcagaaagcggagcgttgatggcgtcagctttgatcgagatctgaatttcagtcaaatacgcagggttaccctggcacgttagcttaactgctttcacgttctcttttccccagcttttggcaaaggcggcgtcaaagtcacggcggctcactgttttaccgtaattatccgcaaggaattttccggcttcgctctctttaatttcttgattcaggcgtaccatagtaccgaagtatgcgtccggatcaaaaccaaagcaggcaccgtgtttggcatattcgtagcgttccaggcaggaacgtccgccagctcctggcatgacttcacttagtttagcggccgtttccagtgataatccggtttccggcgatgaacacatccggctggcgcgcgcttctggtagattcgggattgggcgagtagcgcaaccgaagcgcatccagcggcgttcatcaacaccacgggcagcgaccgatttaggcaatcctggccacagaccatgtacggtcagaaaatcagctttgttggtcgtttcggtttgcaggcgacattcatctcgttcgttacgatttcgatcgtgttgactctggcaaaatccggtttgccaggagagggccaggacatagcgatcaaaatcgccatactgttttgcctgcaacgctacggcgttggcagaagagaagggaagcagagaaaccgcgagcaacgcggcgttacgccagaatgctttcataatgggtgtggaactcatacatacactgaatactatctattaaatcataaaaaagcccgccaggtgggcttacctggcgggcgtgatgatttattcagcgtttggcgaacgtattagttccacatggcgagaatcggccagccaaccaacagcaacatagagatgtaaatcaccccgaagattgcgccaagacgccagtaatcttttgatttcacatagccacagccgtaaataatcaccccaggaccggttgcatacggcgtcagacagcccatgataccgatagacagcaccagcaggatacacagttgttccattggtacgcccggaatacctttaccgacggccagaataaccggcagcatggttgcggtgtgcgcagacaggctggcaaacaggtagtgtgcaaagtagaacaccagaaccagtacaatcaccgttgcgtttggtgagaatccttccaggtgcgtactcatggtaccggcgaaccagtcaataaaaccagaacgagtcaggccgttagccatcacaaccagagttgccaggttgaccagcgtgttccatgcgctgttatagcgggtaatgtctttccacggcacaacgtgcagagccagcattagcgaaactgccagcagaccaaccgcagtagcattaatgacttcactgccaaatacccacaaacctaagctgagcaatacaaggccaatcagcgtccactctctgcgtgtcagcgcacccatggtttttagttcatcacccgcccaggttgccacttcttcactgtgtgtgatttccggtttgtacagcacgtaggaaagccacggcgcaatgataagcaagataaccccaaccggcaggaagcagaggaaccactgcaaccagctaatctggataccggcaattttgctgacgaactccagacccagcacgtttggtgccgcaccggtgacaaacatggacgaactcagactggtactaatgaccatcatccacatcaaatagccgccaatacgacgcgcggacggatcgttggggaatgatttaaacagcggcggcaggtttttaatgaccggaaaaaccgtacccccggtacgcgcggtgttggacggtgtaaacggtgccagcagaatgtcgataatgacaatcgcataacccaacgtcagcgtgcgtttgcccatgaatttcaccaggaaaagggcaatgcgacgacctaacccggaaacttcataccctaatgcaaaaataaatgcgccaaataccagccataccgtggtgctggaaaaaccagccagaccccatttcagcgcctgtttttgcgcattaaacgctgggtcagctaattctttggcatcaaagagcaggtaattactgccaataacgcaaatagtaaccgcaataaaactgatcgctgttgccggaattggctcgaggatcatgccgacaatcattgccacaaacacagcgaagtaatgccatgcctgtggtggcataccgtcggggacagggataagaaacatgacacccatcaccaccagtggggccaatagtttccatatattatcttttgctaaagacatacgggttctccgaaaattaatatttccaaatttatcaagtgcttaaataattaaatctgtgctaaaaaccaggtaaggatcagcaggtcggcactgccgcctggactgagatttcgttcgatacactccctgtcgaactgccggagataatcgagatcggcgggggttcgaatgccccctttttgcaataatgtttgcgcctcgcgctgtagccagcgcaggcccccctcgccaccgcgcgatgcaacgttggtatcgccgttgatcgccatcagtaggagcaaggtatcgagcaatgccagttcaggatctaacccctgatccagcagagtgaggtaatgcggcagggcgtggttgagcactagtggataacccgcttcggcttcaccgcgtgcgccggtaaggccaagctgctggtacaaccgttgacctgccgtcagttgtgaattattggtacgcagttcgcgatcggtcaggccacggcagaaacttgccgccgtagaacaaacggttgttggcgttaccggctggttgagctgaagcaaacggccaattgccgcacatagcagccctaaagaaaaaatgctgcctttatgcgtgtttacgcccgcagtggcgcggaacatatcaccttcgcaagccataccaattgggcgtaatccgtggagtaccgcttctggtgccatttctgcactacaggcaccaaattcaatgaaacggggtaaccagccctgaatcgccagcgcgctgcggtggaaatcttccagcgccatatctttgtgcgcaccgcagttaatgcgatccacaaggcctggtttcggtgacagattgacttcagtcagcatggcgcgccagcccagcagggcgtactcatcgattaatgacgtcgcaagctttgtggttttagttgacgttgcaggcatcgacatcgttcagcagctcctccatgcggttgagtaaatcggtcagttgatgggtttttccacgcgcacaaacagctgcgctttgctcgcacaacaggcagcggcgaggcggcagtgaatagtcgcggcgggagagaatttcgccttcgggcgtcaggacatcgatatcccataaccgcccgagaggatgactatgttcaagctcaatggtggcgagcttgaggtcgcgagccggggcggcaatgctcaacatgccctccggcccgctggcggaaaccagtgcagcctgctcctgaatttgccagccctgctttgtggctaaggcacgcaaggctgtcacgccatgattaaaaattcggcgtgtgacctcgctgtctttaatcggcccaggcgcaaccacggtaaaggagaccagtggaacaggatggcgcttgagccaggcgtgttgccgtgcttgcctttcatcccggctgacgagcagctcgggaattgacaccgcatggtggctggcgagttcaggaagcaggtgcatggcttattccttcacctgatgcacaacatcgatcaccgagccatcgcggtaacgcacaacggcaacgacgcggtcggtgaattcaatcggctgtggttcaccggtcagcagacgcgcacgttcgcgcagccactcaatggaaaccactttaatgcccgcttcctgcagacgttctgccagttccggacgtgccgggttaactgcgataccgtggtctgtgaccagaatatcgacactggagcctggggtgatgcaggtcagcacgttatccaccagagtcggaatacgaccgcgtaccagcggcgcgacgatgatggaaagcgcagaggcaatcgcggtatcgcagtgaccaccggaagcaccacgcagtacgccgtcagagccggtcagcacgttaacgttgaactgggtgtcaatttccagcgcgctcagtaccaccacgtcgagacgatcaaccgatgcgcctttcgaaccccagttagcgtactggttggcgctgatttcgatgtgattggggttacgggccagcgattgcgcagcatggctgtcaaagctctgcacatccagcagtttgcggatcagacctttttcgtgcaggtcaaccatcgtcgcggtaataccgccaagggcgaagtcggcgcgaatatcgcggctacgcattttgtcttccaggaaacgggttaccgccagcgatgcgccgccggtgccggtttgcatggagaaaccttctttgaagtagccagagttgacaatcacatccgcagcgctacgggcaataagcagttcgcgcgggttagtggtcatacgggtcgcgccagcgccgatttttgcagcatcgccaacgcggtcaactttgacgatcaaatcaacctgatcttgctcaatgcttgccggattatgcggataaggcagcagttcttcggtaagcatcacgacctgttttgcgttgtcggcatcaaccattgcatagccgagggagccgcagcaggctttaccggtgtagccgttggcattaccgaattcatcacaggacgggacgccgaggaaagccacgtcgatattcagttcgccgctctgtaccagatgcacacgtccgccgtgagagtggatctgcaccggttctgccagcagaccacgggagatctcttccgccagtggaccacgcaggccggaggtataaatgcgggtaaccacgccctggcgaatgtgttctaccagcggcgcatggcaatcactcagggagctggacgccagggtcaggtttttaaagcccatcttcgcgatgacgtccatcaccatattgacggtcaggtcaccgccacggaaagcgtgatggaaggaaaccgtcatgccgtcctgtaaaccagagcgacgaatcgcttcttccaggttggcgcacagtttgcgatcgcgcgctttttcagcctgataggtttgtttcggcgagttctggaaagcggcaagatcgcattcagcgcgacgattccaggccgctacccgttcttgtcgttgagattgttcaattttctgcgtcattttgattgccttattcttcgcggatgccggaaagttctgcacgggagagcaccagacgggcgcgatcgataaccggaccgtccaccatcttgccgttcagggaaaccacgccgaggccttcgcgagcggcggcttcagcggcttctacgacgcggcgggcgtgatccacttctttctgggtcggtgcgtagaggttgtgcagcagatcaatctgacgcgggttgatcagcgatttgccgtcaaagcccagctgtttgatgtgggcggcttcttgcaggaatccagcttcgttgttagcgtcggaatagacggtatcgaacgcctgaatacccgcagagcgcgcggcctgcaaaatggagcagcgagcgaacagcagttcagttccttccggggagcgttctgtacgcaggttgcgcacatagtcttctgcaccgagggcgataccgatcaaacgctcggaagcgtgagcgatttccactgcgcgggtaatgcccagcggagattcaatcgccgccagcaggccggtgctgccgggttcacgaccacaggctttttcgatacgcaggatctctttttcgatatccagaacatcctgagcggtatcggttttcggcagacgcacaacgtccgcaccaccgcgaacgacggcttccaggtcgttgacaccccattcggaatccagcgcgttgacacgcacaatggtttcaatatcgcgatacagcggatgttgcagcgcgtggtaaaccatgcggcgggcggtgtctttttcacgcaatgctacggagtcttcgaggtcaaacatcagggcatcagccgggtagatgaaggagttgctgaccatcgcggcattggcaccaggcacaaacaacatgctgcggcgggtgcgagttttacgttgttgcagcgaagcggaaatcattggcaatcctcccatggcagagccgggataccgctggcgcgtgccagcagggcttccagtcgtgcacgtaaaatgcagtccagtgcgcctttgtcatcgacattcagctgtacgccgcgcacgttgtagcgggcgagaacgtccagaatggtggtgcgaattgcatcgccaaactgtttctcaacgctgctgttgatttgcaggtcgatatcctgcgtatcgagtggggcgatgcgtatcatcacatccccagactcaagggtgcctgcaacggcgggctggtttattttcatttttcacctgtttctcatgcgggggtcttttgacgagctgccgcgtcctggcgggagtgctcaagcaggttctgcaaataatgcagcgtgactgcagggaccagcggcgcgatagccgtgagatcgtttttcgccagcagttgacgtacccgggaagcggatatcggcatctcctggtaacgcagccgctcaatttcaaccagttcgatgggcggtgcggagatagtcggcgtttccagccagtagcgcatatcctggttgtactgggcggtaacgcgacaaaagggttcagtaccgacaaagcggtgagttacacccagtgcgggagcgaggtactgacggaaaatcttcagatcaatttcggtgtaacaatggttaatgacgctctgttctttaatgaagtagcaagggaacgtagcgcgggagatgatgtattcggagccgcgatgcacagtcaggcgtggaatatcggcggtgccttttaacaccagatccagccggtcttcataggggaagcgtgaagaatcttctttgactaaaaacagatgcaaccagtcgcactgtgccgcagcctgttgaatcagataacggtgaccattcgtaaagggattggcgttcatcacaatgcagccaatcttgttccctggatgacgaaattttttcagcgattcggcatagcgtttcagtcgcgtggcgctgttttccatcagcaccatcacgccgggtacgcaggtcagcgtggaaaaaccgcactggcggaacagcgcctcgtattcggttttggtataaataaacagatgcgtgctgtgccgctcataggcgaggtttatcagttcagtggctaatgtcagcgccagtccttcaccgcgaacggattcactgatagcaacgcatttaataatatttccggcaattccaccgcacgcgataagcttttcatcgcgggttacggtaataaatacttcgactgtggtgtcaacgctcaaatcattttcatgcaggaattgggcgatttccgccatttttttattttctgaacgttttacgcgggtgaaaatatcattgccgaacataataaatagtatcctgaaggtgcatgttgttatcgatttgcaacgaatgttgttcaatgttgcaaactgataactttttattttcacttgggagaaaggtgggtgatcgaggtatatctttttctcctttcgctatacatcctaaggagtatttcggcgtgaaattttgatttatttcacatagagttagtggttttttatttatttaatggttttaagttttttaattaatgtaattacgaaatgactcgcaggtttaagtgatttaattgatttaatgaataaaatttgccacgatcataattaatatctatgtattttgattcaacattttaattacatccgtcaaagaggctcgggacaacccgcaaggaaaacaatgttgcagcttaacgagaataaacagtttgcatttttccaaagactggcatttccgctgcgtatctttttgctgattctggtgttctcaatatttgtcattgcagccctggcgcaatattttacggccagttttgaggactatttaacgcttcatgtacgcgacatggcaatgaatcaggcgaaaattattgcctccaatgacagtgtcatctctgcggtgaaaacgcgtgactacaaacggctggcgaccatcgctaacaaattacaaagagataccgattttgattatgtggtgattggggaccggcactcgatccgcctttaccatcctaatccggagaaaattggttatcctatgcagttcaccaaacagggcgcgctggagaaaggggagagctacttcattaccgggaaagggtcaatggggatggcgatgcgcgccaaaacgccaatctttgatgacgatggaaaagtcatcggcgtggtgtcgattggctacctggtgagtaaaatcgatagctggcgggctgagtttttattaccgatggcaggtgtgtttgtcgtgctgttagggattctgatgttgctgtcgtggttcctggccgcgcatatccgtcggcagatgatgggcatggagccaaagcaaatcgcacgcgtggtccgtcagcaagaggcgctgtttagttcggtttatgaagggctgattgcggtggatccgcatggttacattaccgccatcaatcgtaacgcaagaaagatgctggggctgagttcccccggacggcaatggttgggtaaacccattgttgaagtggtcaggcccgccgatttctttaccgaacagattgatgaaaaacgtcaggatgtggtggcgaactttaacggtctgagcgttattgccaaccgggaagctattcgttcaggtgatgatttgctgggggccattatcagctttcgtagtaaagacgaaatttccaccctcaatgcgcaactgacgcaaataaaacaatacgttgagagccttcgtacattgcgacacgagcatctcaattggatgtcgacgctcaatggtctgttgcagatgaaagagtatgatcgcgtgctggcgatggtgcagggggagtctcaggcccagcaacagcttattgacagcctgcgcgaggcgtttgccgatcgccaggtggcggggctgctttttggtaaagtgcagcgcgcccgggaactggggctaaaaatgatcattgtccccggtagccagctttcgcaactgccgccaggactggatagcaccgagtttgcagccattgtgggcaatttacttgataacgccttcgaagccagcctgcgtagcgatgaaggaaacaagatcgttgaattattcctcagcgatgaaggcgatgatgtggtgattgaagtcgccgatcagggctgcggcgttccagagtctctacgagacaaaatatttgagcagggggtcagtacgcgtgctgacgagcccggtgaacatggcattgggttgtacttgattgccagctacgtaacgcgctgcggtggtgttatcactctcgaagataatgatccctgcggtaccttgttttcaatctatattccgaaagtgaaacctaatgacagctccattaaccctattgatcgttgaggacgaaacgccgctggcagagatgcatgcggaatatattcgtcacattcccggattcagtcagatattactggcgggaaacctggcgcaggcccgaatgatgatcgagcgttttaagccggggctaatcttgctcgataactatcttcctgacggcagagggattaatttattgcatgaactggtgcaggcgcattatcccggcgacgtggtgtttaccactgcagccagcgatatggaaacggtgtctgaagccgtacgttgtggtgtatttgattatctcattaagcccattgcctatgaacggctggggcaaacgctaacccgtttccgccagcgtaaacatatgctggaaagtattgatagcgccagccagaagcaaattgatgagatgtttaatgcctatgctcgcggtgaacctaaagacgaactgccgaccggcattgatcccttgacgctaaacgcggtgcgaaaactgtttaaagagcctggtgtgcaacatacggcagaaacggtggcgcaggcactgaccatcagtcgcaccactgccaggcgttatcttgaatattgcgccagccgccatctgattattgctgaaattgttcacggcaaagttggcagaccacaacgcatataccacagtgggtgacatgataaagccggaggaaacttgcctccggcattactatttacttgcctgtgaccgctgctgccgttcctggcaccatcagctctgtagcaacgataacaatcactagcccaacaagcaccggcaccgaggtgcgttttacgacttcaaatggtgagattttcgccatcccggcaaccgcaacgactacgccagaaacgggtgatagggtacgacccaggtttgacgcctgcagcatcgggatagtcaaatacgccgggttaatgccggaagagtgcgccagtttcgggatcatctcaacaaacgcataaaacggcgcattgcctgaaccggtcgtgactgccgccagcatggtcagaatcaccaataccagcatcaggatgatactcgccgaaccaaacgaggtagcgatagaaatcagactttgaataaagccgatggtgctaagcccctgagcgaataccccagcggcaaccagcagcatcaccacgttagcaaacgcatctgccatcccgcgataagccacttccagaccagagaaaactttctgggtattaaagctgcggaggaactccagaatggaggcaatcagcatacaaatcaccagaatagtgatgatgtgtaattgcggaccccatttaccgtcaaaaatcagtacaccgatgatcggcgtgaacggcaaaatggcataaaacgcaggagcagtggtggtgatttcactgacatctaacatttcatgagagatgtgctcttttttatccagataacgttgccagaagaagtgggcgatcgccatgccgataattgcagcaattgagataggcagcgtcgttttgaaggcgaagtcaatcagcgacatttcggaagcttgcgccgccagcaccacatcccctgaagtcggtgcgagaataatcgccgccggggaggcacaaatggcagcagctgcgccacgactgataccaacgtttaccatcaccggaaatagggttgccatcagcaaaacacccagaccggttgcggaagagacggccagagacatcagacaggcgacaaaataggcggcaatcatcagcaggtaaggggagttaatatactgcaatggttttgacgccagcttgaccaccatatcattcgcgccgatatgggtcatgtaagcggcaaatccacacagcatcataatcatcatgccgaggtcgccgccgcggctcattagtaatattttaacgtattcaacgatatccgtggcgctgtagcctgttgaagcctggctggacggtaacactttgtgccccataatggcactgataatcagcaataacaggccaccgacaaataacacaccagtggcggaataccctttaatgatgtagcgagctacacccacaataaccacaaccccaataaggagttcaatgaatgtcagcataatttttcctgtctccaggccccaaagtaaataataaaaaattcctaaagcttaaggaaaaaatatgcccaataaattgtcgatgaatgctgattaaaatcaagaaaaactgccattaagacattgaagttgctgtttttatacatagataacaaaacgcatatttagcggttggcaattatcacataataatgtgtgcaaattgatggtggattgatgcaaatttgttaattgcaatggtgttagctgcggctgtgcgctcagaaaataatctaatatgagcacaggttgacgatatatattatatacttcgttaagatgattgttgtatctcgttaaaaaataaaataatttttccttgattgcattttgtcatcaaaaaagacttggtttttcttttttgactattcccatcgcagaaaacgacgcatcatctttaatcgatgcgcggaaatatttaacttgaacaagcggaaataaatgagcagctattcagattattctttatgttgggtctattaaggttatgttaattgtagctttgctatgctagtagtagatttttgataaatgttttatggtcacaaatgaacgtgagtaaatatgtcgctatcttttcctttgtttttattcagttaatcagcgttggtaaagtttttgctaacgcagatgagtggatgacaacgtttagagaaaatattgcacaaacctggcaacagcctgaacattatgatttatatattcctgccatcacctggcatgcacgtttcgcttacgacaaagaaaaaaccgatcgctataacgagcgaccgtggggtggcggttttggcctgtcgcgttgggatgaaaaaggaaactggcatggcctgtatgccatggcatttaaggactcgtggaacaaatgggaaccgattgccggatacggatgggaaagtacctggcgaccgctggcggatgaaaattttcatttaggtctgggattcaccgctggcgtaacggcacgcgataactggaattacatccctctcccggttctactgccattggcctccgtgggttatggcccagtgacttttcagatgacctacattccgggtacctacaacaatggcaatgtgtactttgcctggatgcgctttcagttttgagacaaatgaagttttagtaacttctttaaaatcaatagctaaaataagtaacatcaaaaataacgcgacttttatcactttttagtaaagttacactggacaaagcgtaccacaattggtgtactggtaaccgacacagcatttgtgtctatttttcatgtaaaggtaattttgatgtctaagattaaaggtaacgttaagtggtttaatgagtccaaaggattcggtttcattactccggaagacggcagcaaagacgtgttcgtacacttctctgcaatccagactaatggttttaaaactcttgctgaaggtcagcgcgtagagttcgaaatcactaacggtgccaaaggcccttctgctgcaaacgtaatcgctctgtaagatacgtcagcaagaattcaaaacccgcttaatcagcgggttttttttggtctttagtgtgcggttgaggccgaaaacagccagaatgccagtgcggtcatggcaaaagaccccagaaggttgacgaaaacgttcagtaatgcccagccaaagcggccctcttgtaacaaaaacaccacttctgccgaaaatgttgagaaggttgttagaccgccacaaaatccggtggtgattaatactttccacactggatcaatgttcgtcatcctgctgaaccatgcgaatcccattcctatgatgaatgccccaatcaggtttgctgtcagcgtccccaacggaatcgcctgatgcagtgggttaaatcgcatacttaacagccatctcgccacgcttcccgtaccaccgccaataaaaactgctaaaagaagttgtaacactgcaaaatcctgctatttgatttgtatgagtgataagtgtaacgccgaataatcgtcgttggcgaattttacgactctgacaggaggtggcaatgctggttgccgcaggacagtttgctgttacatctgtgtgggaaaagaacgctgagatttgtgcctcgttgatggcgcaggcggcggaaaacgacgtatcgctgtttgtcctgccggaagcattgctggcgcgcgatgatcatgatgcagatctatcggttaaatcagcacagctgctggaaggcgaattcctcggacgtttacggcgagaaagtaaacgtaacatgatgacgacaattctgacgattcatgttccttcaacgccggggcgcgcatggaatatgctggtggcacttcaggcaggaaacatcgtcgcccgttatgccaaactgcatctctatgatgcatttgccattcaggaatcacgccgtgttgatgctggtaatgaaatcgctccgttactggaggtggaagggatgaaggtcggtctgatgacctgttatgacttacgctttccagagctggcgctggcacaggcattacagggagctgaaatcctggtacttcctgccgcctgggttcgcgggccgctcaaagagcatcactggtcaacgttgcttgccgctcgtgcgctggataccacctgttatatggtggcggcgggggagtgcgggaacaaaaatatcggtcaaagccggattatagatccctttggcgtcaccattgcggcagcgtcagaaatgcctgcactcattatggcggaagtgacgcccgaacgtgtgcgtcaggtgcgcgcgcaactgcccgtcttaaacaaccgtcgctttgcgccgccgcaattattatgatgtttttttactcggcgcttgattcaccttgttacagattgctattgtgtgcgcgcgtcgaatgaccgttaatattctctggtttttaaggcgcgttctgttgccggttatatgtcaagaaggtatctatgggtgagattagtattaccaaactgctggtagttgcggcgctggtcgttctgctgtttgggactaagaagttacgtacgctgggcggagaccttggagcggccattaaagggttcaagaaggcgatgaatgatgacgatgctgcggcgaaaaaaggcgcagacgttgatcttcaggctgaaaagctctctcataaagagtgacgtggcgagcaggacgctccctcaatatcttgttcgatacaaaaaacccgcttcaaaaagcgggttttttatcagacagatgtaagtaattattacaggattacttaacttccatccctttcgcctgcaaatcggcgtggtaagaagagcggacaaacggaccgcatgcagcatgggtaaagcccatcgccagcgcttcggctttcatttcgtcgaactcatccgggctaacgtaacgttgaaccggcaggtgatggcggcttggctgcaaatattgccccagcgttaacatcgtcacaccatgacggcgcaggtcgcgcattacctcaataatttcttcattggtttcacccagtcccaccatcagaccagacttggtcgggatttccggatgcgcttctttaaagcgttccagcagcttcagcgaccagttgtaatctgcaccaggccgtacctgacggtaaatacgcggtacgttttccaggttatggttgaacacatctggtggcgttgcagtcagaatatccagagcacgatccatacgaccgcggaaatccggcaccagagtttcaattttgatttgcgggcttttttcccgaatggcagtaatgcaatccgcaaagtgctgggcaccgccatcgcgcaggtcatcacggtcaacggaggtgataaccacataacgcagcgccatatcggcaatggtctgcgccagtttcactggttcattggcatcaggagctaccgggcgaccgtgggcaacatcacagaacggacaacggcgggtacaaatagcgccgaggatcataaacgttgctgtgccgtggttgaagcattccgccaggttagggcaggaggcttcctcgcagacagaatgcaggccatttttgcgcattgcggctttgatgccctggatacgtgtagagtccgctggaagcttgattttcatccattccggcttgcgcagcagggcttcgcgctctgttgccacgtttttaaccgggataagggccatcttatcggcatcgcggtatttaacaccgcgttccatcacaatgggtttactcatagcgtgcgtgttccagttgcgaattacgaaggaaagcgtttcaattcaatagattgttgtaattatcaactatttttgaattaacgactggcagtatatcattgaaacggacctgaaagcagccaaagcggtcgcgaaaatgtaaaattgttgttggattgtgccattttatcgttctgcgctgtgatctggctgtaacaatactttttcaaaatgcattacggataacatctattactccgtgcaggatgggatcacgcaggctgaatttgttgtagtggatagagaaatctatttgctcctcatttaaggacggaaaaggcagtttttccagcggccagcagcggctaaacaggttataaaaacggctgggaataatcgctaacatgtcactgttggcaaccagtgcagcgattgtcaaaatgttgtagctggtgaaattgatttgccggtccggaaacatttcttgaactctctgccgcagaccgctgaaattttgctcttccggtaacagaagtacatgcgcagcgttgtcgatagtctctctgtcatcttctaaagagagtagtggatttccctcgcggcaaattaacaccatattgtcggtgaacagaacatgatgttgcaccgtacgattggtgcaaaacatgttatcgatgatgagatcggtttgaaactgactgagttggttttccgcgtcgctgatgggcgggttgcgcagtaaaagctgcggatagtgagttttaatcgcccgatagatgacaggaaggaccagtgctccgaccgagggagtggtcgcaatagttatcgttcgttgcttatcatagcttccttcgatatccagcgcgccaagaatggactcaaggccctgactgatatactcatgtagatgcatcgcaaatgcggtaggagtgacaccctggcctttgcgaataaacaatggggcagggaatataacgcgcagtttctgaatagactgactgattgccgagggggtcagattaagcactttcgctgcattaacgatccctttatgtacatatacagcttcaaaaatagtcagaaggttaagatcaatatttcgtaaggttgtaaatatttgtggtttaccttctgacgactttctgcttaaacagggttcaatttgattattactatccacgcacttactccaattttattcatggaaaaataatatttaaaaaattacaataatcttatgtctaattggaacggaacgcttttgctcaccataatcaactatttcaataggttaatcaatggggtgagttacggagcaaggcgtggcaccgcatttctgcaagtgataaagaaaatatacaaacgcgaaggagatgtaaagcattagcagatattatgagtaatgacccagtgtaaattgggccattgatgtatggaattaagcggtaatatattcgaagtccggattgtttagtagcgctaaaatattttccagtaaacgtggagcaatattattagtcgtcgcttcgggtttccattgtgatattttagccatttccattccggcatacccacaaggattaatacgtaaaaatggtgaaagatccatattgacgtttaatgccagaccgtggaatgaacaaccgcgtcgaatacgtaaacccagtgagcaaattttcttttccccaacatagacacctggcgcgtcagcccgaggatgcgcttctatacccagttcagccagggtattcaccactgtttgctcaagcaaggtcaccagttcacgcacaccgagtttacggcgtttcaggttaagcaacacatacatcacctgttgccccggcccgtgataagtcacctgcccaccgcgatcgctctggatcaccggaatatcacccggcattaaaatgtgctccgcttttcctgcctgaccttgggtgaataccggatagtgctcgaccagccagatttcatcaagggtactatcatcgcgggtatcggtgaattcatgcatagcctgggagattggctcgtaaggctgaagaccgagctggcggacaagaattttatcctgatacaaaacggcatctccgtggagaatgagtaaaagtgggggaaaagtatatcacagcgaggagaggggagttacccgaccaggagccgggtaacggagaagcgagttacagaaccatgcggacaatatcgattttgcccagttcttcatacagtgtttcaacctgctcgatatgagtggcgttgatagtgatagataccgagtggtagttgcctttgctgcttggttttaccgttggggtgtagtcacctggcgcatggcgctgtaccacttcaaccacctgatcaaccagctcaggtaacgcctgccccataactttgtaagtaaaaggagtagggaattcaagcagttcgttaagtttggttttcatgtcagctccggcgtaacgtaattaaatagcaactcccgccagaaggcgggagttttttactgatgcttagtatatggggacggaaattacactttcaagtgtttaatttttaaccaaaccagtgatggaacattaatttaatgtaatcaatgattttgccgaagaagttaccttccgggatttcttgcaacacaaccagcgggcgttgctcgatcgttttgccatcaagctggaagttgatagttccgacgacctgattcttttgcagcggcgcatgcaattcactgctgttcagcacatagctggctttcagatctttcatgcgaccacgcggaatggtcaggtacacgtctttatcaacccctaacgaagcgcgatcagaatcaccaaaccaaaccggttcagaggcgaactctttacctactttcagtgggttaacggtttcaaagaaacggaagccccaggttagcagttttttactttcggcttcacggcctttaaaagtacgtccgcccattaccgcagaaatcaagcgcatctggccttcagtcgcagaagcaacaaggttgtaacctgctttgtcagtgtgtccggttttgatgccgtcgacattcaggctgttatcccataacaggccgttacggttcagctggcgaataccgttaaacgtaaattctttttctttatagatcgagtattcattcggtacgtcacggatcaatgcctggccgatcagcgccatatctcgcgcggagctatactgaccatcagcatccagaccatgtaccgtctggaagtgggtatttttcaggcccagtgcgttaacgtagctgttcatcaagccaacaaaagcgtcctggctaccagcggcaaaatcggccatggcgacacaagcatcgttacccgattgcaggttaataccgcggatcagctgagaaaccggaacctgcatgcccggtttgaggaacatcagcgaagaacctttaaacaccgggttaccggtggcccatgcgtcgttgccgatagtgactaaatcagtttctttaaatttaccggctttcattgcctggccgataacgtaactggtcatcattttggtcaggctggcaggatcgcggcggacatctgcgttctgttcggcgagcactttgccggagttatagtcaatcaggatgtaggactccgcatcgatctgcggtacacccgggatcatagttttgatattcaggtcatcggcatgtgcagcagagataaaggctgtgcaaagagccgtggtgagcgccaggcgcttcatgatacgagcggaaaaaatggtattcatggtctgaactacgacatccgtgatggaattaaaaaagtgccctactatagcaaatgcactaccggcaggcatctgactttccgcgtgactttgttaacgtcatttacagaaattgacacatcagatgcctgctttacgctactgcgcggtagtaataaatgactgtaattgggcttcggtttgcaaacgttgctgcaaggtactggcttcggctttgctggcgaatgggccaagctggatccgccagaccgcgccattttgagttacgcgaccggggacgccgaacttctgtcccagttgctgttggtactgttgcgcacgagcctgatcgcttacggccccgacttgcaccataaagttgccgctggcgctttgcgagacggcttgcggtgtcaccattgcaggcgaggttgcaggcgttgtcgacggagctgtaacaacgggctgtggcgcaggcgtcggttcgctgccttccagtacaccaggcgctaaggtcgttggtgcgccgaggaaaccgctactggttaccggcgcgccggtcggatcttcgctttttagcgtcgaattactgaccggaagaatgtcaccctgcgggccagacactgaacttgttcccgcgccaccgcttaaatcgggaggtgcaggcagggcgtaagtctgtttggcgactgtggtacaagccataccaggaccagaaagcgaaccatcctgggcaacaataatcggatcgatacgaactttggtgttgtttgacgtgttaagacggtcagctgccgcgcgagaaagtgaaataacgcggtcgttgccgtaagggccgcgatcattaatgcgcaccacgatcattcgcccgttagccaggttagtgattctggcgtagctggggatcggaagcgttggatgggctgccgtcagctgtgtcggatcgaatgcttcgccagaggccgtcaggttactgccgggttcggcatcatagattgccgccagtcccgcctggctaaatcgagacggatcctgcacgattttgtagcttttaccgtcgcgctggtaatcctgatttgccgtcgcgttcagtggttcgaaacgcgggtccgccccgctaatttcaactatagggccgttacataccgcaggctgcggtacacttaccgtctgttgctgaccatcatcgcttgtacatgccgcgagcattcctgccgcgatgcagatcccgagccactgcttacgcattgcgcacctcttacacgcttttcgacaacattttcctgtgggtgtggattgacattacaatcccgaacccagccatcagcacaattagcgccgatcctccataactgaccagtgggagcggaacccctacaaccggcagaataccgcttaccataccaatatttacgaagacataaacgaataatatcagcattaagccgccagccatgacgcgaccaaaggtggtttgcgctctggcggctatccacagcccgcgcatgatcagcagaatgtagagagcgagcagaatcagaatgcccactaatcccagctcttccgccagtaccgcgaagataaagtcagtatggcgttcggggagaaattcaagctgtgactgagtgccgtgcagccagcctttgccgcgtaatccgccggagccaatagcaattttagactgaataatgtgatagcccgcgccgagtgggtctgattccgggtccaggagcatcattacgcgctggcgctggtaatcatgcatcaggaagaaccacagaatcggaatgaacgccgctaccagcactactgcgacgccaatcagacgccagctaaggccagagaggaacagtacaaacagaccggaaagcgcaacgaggattgatgttcccaggtcaggctgtgcagccaccagcagcgtgggcataaatatcagcaccagcgcgatgccagtgttcttcaacgatggcgggcaaacgtcgcggttgataaagcgcgcaaccatcagtggtacggctattttggcaatttccgacggctgaaaacgaacaataccgaggtccagccagcgttgagcacctttagagatggcaccgaaagcatctaccgccaccagcaaaataatacagatgatatagagatagggggcccagccttcataaacgcgtggaggaatttgcgccatcaccaccatgatgaccagacccatcgcgatttggccgattttacgctccatcatgccaatatcctgaccgctggcgctccagataaccagggcgctgtaaaccagcaatgccagtaagatcagcagcattgtgggatcgagatggactttatcccagaatgtttttttattcggattatccgtcatgattaatggtcctccgctgcggcaaccgctggattttccgcaggcagatcggtgttgttatcacccagcataatgtggtcgaggatctggcgcatcagtgtaccaaccgccggacccgcaccaccgttctccagaatcatggcgacagccacttgcggattgttgtatggcgcaaaggcggtcatcagtttgtggtcacgtaaacgctcggcaattttgtgcgcattataggtttcgttcgctttcagaccgaagacctgagcggtaccggatttcgccgcaattttgtacggtgcgctagcaaagtatttatgcgccgtaccgttagggcggttagcaacaccgtacataccgtctttcgccagctcccagtaaccggaatgaatatcgccgacgggcggttcatgcggctgtacccatggcacctgtttgccgtcttcggcggtgctcatcagcaaatgaggaaccttcacgataccgtcattaatcaggatcatcagtgccttactcatctggattggggtcgctgtccagtaaccctgaccgataccaaccggaatggtgtcaccctgataccacggttttttaaagcgtttctgtttccattcgcgggtaggcatgttgccggaacgttcttccgccaggtcgataccggtgtaatgaccataaccgaatttacccatccattcggagaggcgatcgatccccatatcgtaggccacctgatagaagaaggtatccgcagattcttccagcgatcttgtgacattcagacgcccgtggccccattttttccagtcacgataacgtttttccgaacctggcagttgccaccagcctgggtcaaacagcgtcgtattgcgcgtgatcaccccggcgctcaatgccgaaaccgccacatagggtttaactgttgacgcgggaggataaaccccctgtgtggcgcggttcaccagcggtgtattcggatcgttcaacaaggcggaataatctttgctggagataccgtcaacaaacaagtttgggtcataactaggcgtggaaaccagcgccagcaccccacctgtacgcggatcggtgactaccacagctgcgcggctacccgccagcagcgtttcaatatattgctggagtttgagatccagcgtcaggtaaatatcgtgtccggcttgcggtggtacttcttttaactggcgaataacacgcccacggttgttaacttcaacctcttcataaccggtctgaccgtgcagcacatcttcatagtaacgctcaatgcccagcttaccgatatcatgcgttgccgcatagttggccagtttgccgtcattattcaggcgttcgacgtctttatcgttgattttcgacacatagccgatgacgtgggtcaacgccgaaccgtaaggatagtaacgacgtttatagcctttaacttcgacacccggaaaacggtactgattgacggcaaagcgagctacttgtacttcggtcaggttagttttcaccggaatagaggtgaaacggtgtgaacgtgcgcgctcttttcggaatgcagcaatatcgtcatcggtcagatctaccacgctgcgcaaagcgtccagcgtttgctgcacgttatcgactttctccggcatcatttctatctggtagatagtgcggttgagggccagagggataccgttacgatcgtagataatgccgcggctgggcgcgataggcaccagcttaatgcggttttcattagagcgggtctggtagtcggtaaagcgaacaatttgcagattatacaggttggcgataagcacgccggtcagcagcaaaatccccaaaaaggcgaccagcgcccggcgcacaaacagcgcggactctgccgtatagtcgcgaaaagagttctgtagtttcatccgctgcgttttctactcaaagctcccttatcactcacggtgataaggatggttggtggtgatgctccacgcccggtacagactctctgcgaccagcacgcgaaccagcggatgggggagggtaagcgccgacagcgaccagctctgctcagccgccgctttacaggcaggcgacaacccttcaggcccgccaatcagtagactgacgtcgcgaccatccagcttccagcgttccagctcagcggctaactgcggcgtatcccagggcttgcctggaatatcgagggtgacaatgcggtttttgcctgcggccgccaacatctgctcaccctctttgtcgagtatgcgcttgatgtccgcattcttgccgcgttttccggccggaatttcaatcagctcgaagggcatatctttcggaaaacgacgcaggtactcggtaaaaccggtttgtacccagtccggcattttcgttcccacggcgacaagttgcagcttcacgcattaactccagagtttttccagttcatacaggcgacggctctcttcctgcatgacatggacaatcacatcgcccaaatccacgacaatccagtcggcgctgttttcaccttctacgccgagcggtaacaggcccgctgcgcgagactcctgcacaacgtggtcagcaatggacataacatgacggctggacgtacccgtacagatgatcatgcagtcggtgatgctggatttgccctgaacgtctaaggcgatgatgtcctgacctttgaggtcatcaattttgtcgataacaaaatcctggagtgctttaccctgcaagttttccccctgggtgaatcaaatagataaaaaatggtctgtcagtatacctgaaccagaggcgatttcgggacaattgtcgccgaatcggctttcgaaagtgggctatcatcccaccccgcgccgcagattgcatcgccatttttgtaaaacaatttctacaaagtcgtgtctggcggaaaaagtctggctgcggagaatatcagcctgcccgggtctgtcaatggtcgttgcggcttacccgtaaaaaaacagaaaagtcatgcattctcgaccccgatggcacggctattgaggacgcgtagcgtcgcgaatttttggttgatatcaatggcgctccaacacccctggtcaacgcgaaaatgccacatagcctcggcaggcatgccaattaaacgggcgattaacagactcagtacaccctgatggctgacgactaaaatattctgatagtgctgaaattcactaagccttgcgataaagcgttccacacgttgcgaaaatgcctgaaatccttcaccgttcgtggggattgcatgctgccagtcattgcaccacgcgctatagttttcggcatcttcttgcatgaggtcgcgatgatgtcgcatctcccagtcgccaaaaaacatttcgttgagttcaggtatgatttgcacggggagctggcggtcactgagaaccagtcgcgcggtatgctgtgcccgttccagttcactgcataaaaccagatcaaaggaaacaccatgtagcagcgtatgcagattttgcgcttgctcaataccgcgcgcggtcaggggggtgggcgcatgaccgctgtaaagaccatcgatattcgcttgcgtttcaccatgacgaattaaccacagtcgcatcatgccctccgtaacgacaggtatcagcgatacaagccttgttggttaatgtaagtcaataccggttccggcaataaatcctcacacgattcaccgttttgcaaacgttcgcggatgatggtcgccgagatgttaaaccacggcgtttcagccagataaattttaccggcaggctgaaggtgaagatcttccgggttatgtgtcaaatgatcttccagccattgctggtattgcggttgcgccatttcaagtgggtaacctggacgccgacagacgatcaaatgtgcattgtcgagtatcgtttcgtattcgtaccaggtcggaaaggtcagcaatgaatcctgaccaataataaacgccagcggcacgtccggtccttgttcctgccgccactctttcagtgtttgcgcagtgtaagagggggcattgcgctttagctcgcgttcatcaagagtaaataatggcttgtcggcaatcgccagttcaagcatgtgtttacgctgcacgctgttcgcttccggctggggacgatgcggaggaacattattagggatgattgtgacccgcgtcagaccaatcaaattcgccagcgtttccacgggttttagatgaccatagtgcaccggatcaaaggtgccgccaaacagagcctgtaaagatttcatatcaaccgtcgataaatacgtccgccaggggtttatggcacaacagaagagataacccttccagctctgcccacactgactgaccgtaatcttgtttgagggtgagttccgttcgtgtaaggagttgcacggcctgacgtaactgcggctgacttaagcgatttaacgcctcgcccatcatgccccggcggttctgccatacccgatgcttatcaaacaatgcacgcagtggcgtatgggcagactggcgtttcaggttaaccagtaacaacagttcacgttgtaatgtgcgcaacaaaataaccggctcgctgccttccagacgcagttgctgaagaatatgcaacgcgcgcttactttttcccatcaacaaagcatcaacccaatgaaaaggggtgaaatgcgcggcatcattcaccgcctgttcaacgcgcggtaatgtcagtttgccgtctggccagagcagcgataaacgctccagtgcctgagccagcgccagcaggttaccttcataacagtagcagagcacctgattcgccgcgtcatccagttctaagttgagctgttttgcgcgcgcagcaacccagcggggaagctgagcctgctccggtgtctgacaggtcacctgcacgctgcgattcgcaagagcagtaaaccaggcggcattttcttgcgctttgcttaatttattaccgcggacgatcaacagcaggtcgtcatgcagaagtccggtgagtgtgagaagttgttcattgatcgccccattcggtccgttttctggtaacaacagcaatagcgtttgtcgactggcaaacagactcatagcctggcataacgaaaagatcgcattccagtcagtgttgggatcaatggaaaaagtgtggtgttcttcgaatccttgtgccgcagctacctgacgaacagcgtcctggctttcctgcaataacagaggatcgttaccaagtaaaagatacgccgcgcgcagcccttcattgagctgcgcgcggagttgttccgggtacaaccgaatcatcagttacccagcgtggtggagacgcgtgcaggcgttgccggagtatccgttgtggtcgacgtctgttcttcgtcggaacgaatatccgcagcacggatgcttggcagcttacgaatcagctgttcggcagcacggtcgtacatctcttttacgatcatgtcttgttcgttatctttcgctaacgccatttgcgggttatcaaagaacgaacggaagactttggcgctaatcgggtagatatcacggccggggatcaacacggtcgcattcaccgtcatgatcatctgatactctgctgtttgaccgttacggaataccgatgcggtatctttcgcgatgctcactttacccaaacgcagggatggaacgtccttacgcgtggtttctttatcaagcaactcgacaccattcagacgtaactggttacgcaccgcacggcttaatggcccgttcggatcgcctgagtccaggatcatgaccttcatagtggaaggaacctgcgtggtatcacgcagatgccagccacacccggcggtgattaacaccgccagagataacaacaatgttgccagatatcgcacgcttcctcccgcgcttagccaacgaccagattgaggagtttacctggtacgtaaatcactttacgtacagtaacgccatcaagatattttgctaccagatgttcctggccagcacgttcgcgaacctgttcttccgttgcgtccaccggaacggtgattttggcacggactttaccgttaacctgcaccacgaccagcgtggagtcttccaccatcgctttttcgtcagcaaccggccacggcgcgttgtcgatatcgccttcgcctttcagttcctgccacagcgtgaagcagatgtgcggggtgaacgggttaagcatacggacaacggccagcagcgcttcctgcatcagagcgcgatcctgctcgccatcggttggtgctttcgccagtttgttcatcagctccataatcgccgcaattgcggtgttgaaggtctgacgacggccgatatcatcggtcactttagcgatcgttttatgcacatcgcgacgcagcgctttctgattttcagtcagcgcatcaacgttcagtgccgcaacatcaccttttgctgtgtgctcgtaaaccagtttccagacacgtttcaggaagcggttagccccttccacaccggattcctgccattcgagagtcatatcagccggagaagcaaacatcataaacagacgaacggtgtccgcgccgtaacgttcaaccatcacctgcgggtcgataccgttgttcttcgacttggacattttgctcatgccggtataaaccagttcatggcctgccgcatctttcgctttcacgatacggcctttctcgtcacgttcaacgatagcatcaaccggggaaacccagttacgttcgccgttttcgccaacatagtagaaggcatctgccagcaccataccctgacacagcaactgtttcgctggttcgtcagagttcaccatgcctgcatcacgcatcagtttgtggaagaagcggaagtagagcaggtgcataatggcgtgttcaataccaccaatgtagatatccaccggcagccagtagttagccgcttcggaatccagcataccttctttgtactctgggcaagtgtagcgcgcatagtaccaggaggactccataaaggtgtcgaaagtgtcggtttcacgcagcgctggcataccgttaacggtagtttttgcccactccggatctgctttaatcgggctgttaatgccgtccatcaccacatcttccggcaggatcaccggcagctggtcgtccggggtcggcattacggtaccgtcttccagcgtcaccatcggaatcggcgcgccccagtaacgctgacgagaaacaccccagtcgcgcaggcggtagttcactttacgctcgccaacgcccatcgcagtcagtttatcggcgatggcgttgaaggccgcttcatggtcaagaccgttgaactcgccagagttgaacagcacgcctttttcagtcagggcttgctgagaaagatctggctcagagccgtcagctgccaggataaccggtttgatgttcaggccgtatttagaggcaaactcgtagtcgcgctggtcgtgacccggaaccgccataactgcgcccgtgccgtactccatcaatacgaagtttgctgcccaaacgggaatttcttcgcccgttaatgggtgaacagctttaaagccagtatcgacgccttttttctccatcgtcgccatttcagcttcggcaactttggtgttacggcattcgtcaataaaggccgccagttcaggattattttccgccgctttctgcgccagcggatgacccgcagctaccgccaggtaggtacaacccataaaggtgtccgggcgggtagtgtaaacggtcagcgtgttgtcatagtcgttaacgttgaaggtgatctccacgccttcggaacgaccgatccagttacgctgcatggttttaacggtgtctggccagtgatccagtttatccagatcgttgagcagctcgtcagcgtaagcagtgattttgataaaccactgcgggatctctttacgttcaactttggtatcgcagcgccagcagcagccgtcgataacttgttcgttcgccagtacggtctggtcgttcgggcaccagttgaccgcagaagtcttcttatataccaggccttttttatacagctcggtgaagaatttctgttcccaacggtagtattccggcgtacaggttgccagctcgcggctccagtcataaccaaagcccagcattttgagctggtttttcatatacgcgatgttgtcgtacgtccacggtgccggagcggtgttgtttttcaccgccgcgccttccgcaggcagaccaaacgcgtcccagccgatcggctgcaggacgtttttgcccagcatacgctggtagcgggcgatcacgtcaccgatggtgtagttacgtacgtggcccatgtgtagtcgaccagaaggatagggaagcatagacaggcagtaatacttctctttgctctcgtcttcggttacttcaaatgtgcgcttctcatcccaatgaagctgtactttggattctatctcttccgggcggtattgctcttgcatggcagccagtggtcctgttttcaatacggctacaaatgtagcgttgaggtggtttttcagatccgcatagcatagcccaaacgtccgcgtcaaaacagcctttcgcgcactcgacgttgaaatgatgcccggattattcgtacattaatttacagagtttgtgggcgtattagcaaagcaaggaacaaagaacgtctattattatagtcagttaacgacccgggagatgaaacgatgaacaaggttgctcaatattaccgtgaactggtcgcgtcactgagcgaacgcctgcgcaatggcgaacgtgatatcgacgcactggtggaacaggcgcgcgagcgcgtaataaaaacaggggagttaacgcgaaccgaggtcgatgagctgacgcgagctgtcagacgtgacctggaagagttcgccatgagctatgaagagagcctgaaagaagaatctgacagcgtctttatgcgggtgattaaagaaagcttgtggcaggagctggcagacatcaccgataaaacgcagcttgaatggcgcgaagttttccaggacctcaatcatcatggggtttatcacagcggagaagtggtcgggctgggaaatctggtctgcgagaaatgtcacttccatctcccgatctacacaccggaagtgctgacgctatgcccgaaatgtggtcatgaccagttccagagacgcccgtttgagccgtaatagtctgatttcgcacagcaataaagagaatatgggccgaatgaaattccccggcccttgtttttatctctacagtaaatcttcagtctcacgaatttcctgactgacatctctggttccggatgactgaactttacgatacaggtcgagagcctgtcggagatcgacaggtcttccttctccgtagtgatacataatggccaggttataccaggcagtggcgtcattgcattcagcggctttcgtaaaccattcaaaggcagcctgataatctttctcaacgccttgtccgtgtttatacatataaccgatgttgacgtaagcgccgacgctcccctgagcggcagccttcagataccagtacatcgcttgcttatagtcctggtccaccccttcgccagcgttataatcccatgcaatttgaaactgggcgtgccgattaccctgctgtgcgcttttcaaataccagaatgcggcgagtgtcttgttttgagcaacgccttttccgtcttcataaagatcggccagattgttttgcgcgtcactatggccttgtaatgcagcttgtttgtaccagaaaaatgccagcgcatagtcttttgcgactccgttgccatttctgtacatccacccaagattattttgcgcataagacattccgctctccgcggctatctgataccagacaaccgcttctttataattgggggcttctccacgatccagtgtccagccaagggcgttggaagcgaaagtatggccttgtagggcagcttttttcagccagaagatggcttgctcattatctttatgacggcttttatcctcggtatacttttgccctaaggaatactgtgcttcacaatgaccttgctcagcggccagcttcagccagtaaaaggctttttcgtcgtccggagaatcaattgcgctatcgcgattataataaaacccaacaatatattgagcctcgcaatcgcctttttcagcacgttcgataatctcatctattgataaattatcgcagcaacttgacgtgaaaatcattatcatttccttatggttgcagataaaacatattatatttttatgtgttccatttttgcgtaagccttattttatgcgtattatgtcgcgtcagaaaagtataaataaacgagcctcgcaatgcggctaatattcatttaatgaatatttaaggataaattatatggacatggagtcgcaaaaaatattgtttgcactttccactccgatggaaatacgcaatgaatgctgtttaccttcgcattcatcacccaaaatgtatttaggtacatgcttttttgacctttcttcctcatggggaattgatgaccgtgatgacctgctgcgcacaattcaccgaatgatcgataacggtcatgccgctcggttggcagggttttatcaccgctggtttcgttattcgccatgtgaatggcgtgactatcttgctgaattaaatgagcaaggtcaggcttatgcgcaatttgtcgccagcaccgccgaatgctgtggcgaagggggaatcaaagcctgggattatgtccggatgggttttttaagccgaatgggcgtacttaataactggttgagtgaagaagaaagtctatggatccagtcgcgtattcatctacgggctctacgttattatagtaactggcggcaatactttgccggttatacctttggtcggcaatattggcagtctcccgaagatgatcatctgcctttattacgcgaattcttagcgcgtaaagaatacgacgattccggcaatgatatgttttatcaattatttgccagtgacgatgcatattacgcgaccttaccctggcaaccactggctgactaccccacatgcccggaaacgcttaaggatatgagcgacctatgaaaaattgctggaagatcctcaacatagaggaaacgactgacgtcgatattatccgccgcgcttatctggcgctgttaccgtcctttcatccagaaaccgatccgcagggttttaaacaacttcgtcaggcgtatgaggaagcgctccggattgcgcagtcgcctgctaaatctgtttggcaaccagaagaatatgaggtagcagaacatgaaattctgctcgcctttcgtgcgttacttgcctctgatagtgaacgttttctgccctccgcctggcagcgattcattcagcaattaaattattgctcgatggatgagattgatgaattacgctggtcgctgtgcacaatagccatgaacactgcccatttatccttcgagtgcgtggtgttattagcagaaagattgcggtggttacaggaggaaaataccggggaaatagacgaagaagaactggaatcctttttatatgccattgcgaaggggaatgtttttaacttccagaccattctgcatctgcccgttgccgtgcaaaatgacaccatcgatttttaccaaatgttcgctcggatttggtcatcgcatccagaatggctgacattgtatttagcgcaacatcgcgcagtgattatccccgatgatgcaaaaatgcacagaaatttactccgctggtatagcgcaggtcgcctgggaattcccgaactccagggttacgcccggtcgtggcgggaagctgaatctgataatgaagatgcgcgttattatgaatacgcacaacgcgtctattgtggagaaggcgaaagcttgctggcagaactttgtgactactggcgcgagtatccctccacccaggcggatgctttaatattgcaatggtgccgtcagcatcgggtcgattattacccgttagtggtgatgatgattgaagctcgtgaactggttaacgatcagggaaaaccgctactttatgtccctggtgacagcgcccgtacgcgttttcatttatacgaaatactcagcgatgaaaaactctctgctctggggcgttcactggtcgagatggttttgcacaaaggacgtaagccgcggatctcactcacgcgtgatacagaacataccttatggccattatatctagttgccaaacaattagtgcaggccagccaacctacagaagaatcattaatgccgattgtaagccgtcttgatgcagaagatcgttgtccactggaagcattaattattcgtcgattattaattcaggcggcgaattttaccgagaagcagactgttgaaccggagccgcaaccgcagtcgatccccgttgacgatggtgggccgggctgcctgggcgtcatcaaaattattttctacatttttatctttgccggtttgatagggaaaatactccatctgttcgggtgacagtcgacgttaatgtgcgggaagcccggcaagtaatctttccgcgtttttgtaatgttgtttggcggccagttttaaccatttttgagattcataatggttaacattaatacctgagccatttctgtagattaaacctaaagtatattgagcatgagcatacccttgttcagctgcttccttataccagagaattgctttacgggtgtcgggcttgacccccagacctttgaggtagatccaccccagtttactttgcgcgcgtggattttcctgttccgctgattgctcataccagtatctcgcctgtgtataatccagtggtttaccgtcgctaccatgaagataaaattctccaaggcgatattgcgacgttgagtgaccatgaatcgcggaaagctccgtggctgccgtggtgaatggaagactgcccggtgagcttaaataatcaaaggcataattcgccatggctttatcacgcaacgtcgttttcttgggttggctaatacaggtaattgctgcaactataaaaattgcgaatatatacattaattttttattcatgtgtgaatgcttcgattttctttttattttgaaagcgtcaagtttatactcatcaataataaaaaagtagtcagttaatgcacttaagggattattaacaaatgaataaggaagaacaatatcttctttttgcgctttcttcgcccatggaaatacttaatcagggttgcaaacccgcgcatgactcgccaaaaatgtatactgggataaaagaattcgatctctcatcatcctggggaataaataatcgtgatgatttaattcagactatttatcagatgactgatgatggtcatgccaatgatttagctggcttatatctgacatggcatcgctcttcccctgaagagtggaaagcatttattgctggtggctcggagagagggttgatttatacccaattcgttgcccaaaccgctatgtgctgtggggaagggggaatcaaagcctgggattatgttcgaatggggtttctgtcacgggtcggtgtgctcaacaactggctgacggaagaagagagtttatggctgcaatcgcgcgtctatgtacgggctcaccattactatcacagctggatgcactatttttctgcctattcactagggcgtctctactggcaatcttctcagtgcgaagacaacgcttcgctacgcgaggcgctaaccctgtacaaatacgatagcgccgggagtcggatgttcgaagagctggcagcgggaagcgaccgtttctatgccacgcttccctggcagccattaactgtccagcctgaatgcccggtaacgcttaaggatgtgagcgacctatgaaaacatgttggcaaatcctcgaaattgaaagcacgacgcaaatagacattatccgccaggcttatcttgctcgcttaccgtcgtgtcatcccgaaaccgatccgcaggggtttaaagcattacgccaggcctatgaagaggcgctgcgactggcggtaaatcctgtcgaggaagcagatgatgaagaaaaagatgccaccgctgaacatgaaatactacgtgcattcaggacattactggattcagaaagtgatcgttttcagccctccgcctggcagaaatttattcagcaattaaatacctggaacatggaggatgtcgatcaattacgctggccgctgtgtgcaatcgctatagaagcgcgatatctttcattgaattgtgcttctttgctggcagagcgtttgaactggcattcgtttaatgacagcgaaggaatggatgaggaagaaagggaggcttttcttgaggccattcaggctggtgattgtttcgatttccttagccttctggaatatcccattgcgttgcagaaccagacggttgagtattacttcgcgctggaacgttgctgccgttaccatcctgactatgtcactgcgtttttggcgatggaaggtccgtggttcattcctgatgatgcgaagttgcatcgcaaactgttgcgctggtacagctcggtgcaaacaggtatggcggaactcattcctgtagctcaacagtggcaaatggaagaaccagaaagcgaagatgcccgatattacttgtgtgcacaacgtttgtactgcggcgagggggaaagcctgcttgccgatctctgcgcgtactgggaaagttacccatctacacaagctgataatttgttgttgcagtggagcaagcgtcattgcccggattatttcgcgttattagtgatggttatcgaagcgcggagcatggtagatgcgcaaggtaaaccattgaaatatgttcctagtgagagcgcccggacgcggctgttatgggcggagattttacatagcggaaaattatcgccgttaggtcaatcgtttattgagtcgctattcttcaaacgcaaagcatgggcgtggtggaaatcgagagtcggtagcgagacagagcaagattcaccgttactggatttgtatcgggtagcggaacaggtagtacttgaagcgtttccgaaacaagagatgctggcccgtcttaatacaaggctggaaggcggagatgctcatccattagaggccattatcacccggatgctgttgacgaaagtaaaactcgagccggaggatgaagatgtcgatgagccaacacctgaaaaccatgaagaaaaaaatgatgagggtgaaaaaccacagagcattaccagcattatcaaaatcagtttaacggtgctggttataggttatgctctcggcaaaatcgcgatgttgtttagttgacgatgtgttttttgcgccgatgccggatgcagcatttacgccgcatccggcagccgtgattatgggatctcaatggctaaataatcgctcgcccgccgccgaacttcatccacgcgggccatatcgtttgactgcaacgccgcatcaaaatcggtgatcacccggccaatctcttctcgctcgtcacccagcgcccgcgcccacaactcttccagtttggctttaaaggtacgattgatgagcatatcgcgcggataaattttcaatgcggataaccgcgtccgactctcttcaatctgctgcgcgctcaatgttaccgggctgtggttaatcactctggacttaacgctgccgtcttccagaagcacgtcaacttcaagcaacccgttgatatcataactaaagcgaatatcaatcgactgataagccccggttttcttcaacggcacatcgaaggattccaccagaatgttatttttaactttgtggttttctccctgatagacgttaaccgtaattgaatcctgctccgggtgcatggtcgagtaagtttctacacgcgacaccggtactgtggtgtttcgttcaataatcggcgagaaaatgccggatacgccctgacggttaacttcaacgcccaacgagtaagggcaaatatcagtgaggatcacttcttcaatatcttcactgcgtaagcggcaggctgcctggattgctgcgcccagcgcgacaatggtgctcggatcgtaactttgatacggtaatttgccaaacagacgcacggcgattcgctgcaccagcggcatttgtgacgcgccgccaaccagcaccagactgtcgatttgactcggcttcagacgcgcatcgcgcaacgcctgttcaatcggcactcgcaagcgattgagcagcggcaaccacaaatcttccagttcattctcgtaaaaatcgcattcccgtgcttcatcctggtactgccagcgaatgtgcattggcgattgattgctacattttgccgcttccacacaggcgtacaaggctgccagttcactctcgttaagcgtggtcctggcgacatccgcgcgctttaaaacttcatccaccagcatatgggtaaaatcttcgccaccaagaaagttgtcgccagcggaggcgtgaacttcaatcaccggcgtggcgtactcaagcaccgtaacgtcaaacgtgccaccaccgagatcaaacaccagcgaacgggtattttgttgggtatgcaggccatacgccatcgcagctgctgtgggttcattaattaagcgtaccgcatttaaaccggctaactccgctgctaaacgggtatgcttgcgttgttcatcgctgaaataagccggaacagagatcaccacatctttaatcggacgttgcagaaattcttcggcatcttcttttaatgagcgtaataccaaagaggacagttctggcgcgttaaatgtgtcgctgcctaaccgccagttggtattactgcccattgcacgtttaaataacgctgccgttttatccggatgcgaagtacgccgtgatacagccggttttccgactaaaatatgattattttcatccatgctaattatggatggtgttaaatattcaccgaacttatttggaattaattgcgcggcaccgtctttccagacggcaattaaactattggtagtaccgagatcgataccaatggcgagttctgcattatccattgcatttatatcttgaaagaaaaagagataaacagattaagaccacccaggtaacgcgtggtgatcttaatcaatgacgtgtgttaagcgtaaaatttcagacgatcagccagtaaatcaacaaagccctgacgatcaacatcgaccattacggtggcattcggtttattgcctgtcagataataataatcaacaaccgtcataccctgggtatatttcccctgtgtttccacgccaacccagcgctcaacagaggtaaataactccggtttcaacagccaggcgatggtgcatgggtcatgcagtggtgcgccgacaaagccccatttttcgtctttatgatattcgaggaagaaatccagcagttcggcaacaatggttgaaacagggttaccaatcgcgcggaaacgctcggtgtcttcaacgtggatttgtgctttatgagtaacatccagaccggccatcaccaccgggatccctgactggaagacaatttctgccgcttccgggtcaacgtaaatattaaattcagccgctggcgtccagttaccaagccccattgcgccgcccataatcacgatacgggcaattttgctatgcagttccggatggctattgagcagcaaggcaacgttagtttgcggtccggtagacacaatggtgacaggttccgcactttcacgcagcgttttcgccattagctctaccgccgtacagttttgcggtgcgaacgccggttccggtaatgccgggccgtcgagaccgctttcgccgtgcacattgtccgcgataatcaactcacgcattaacggttttaccgcgccgcctgctaccggaatatcggtgcgattgagcaaggtcagcatacgaagaacattgcgtaaggttttttctggtgtctggtttccggcggaagacgtaattgctttgacatcaagctctggtgaggcgagggcgagaactattgcgatagcgtcgtcatgacctgggtcgcaatctaacagaattggcagtgccattgttgctccttgttgtgtgcttctttgcgacaagggtaacgccaggatgtaacagatacgaggggcgaaacgataaagcgtgagatggcgcgcaattgggtatgcgcgccagagtgattaatgcaggattttcgcgaggaagtcttttgcgcggtccgatttcggatcatcgaagaacgcatctttcggcgagtcttcgacaattttaccctcatccataaagatcacccgattcgccactttacgggcaaaacccatttcgtgggtcaccaccatcatggtcattccttcgtttgccagttccaccatcacgtccagcacttcgttgatcatctccggatccagcgccgatgtcggttcgtcgaacagcatggcaataggatccatacacaatgcgcgagcgatcgccacacgctgctgctgaccgccggaaagctgcgccggaaatttattggcatgtgcggaaagtcccacgcgctccagcaatttcaatgctttttcacgagcgggcgctttatcgcgtttaagcactttcacctgcgccagagtcaggttttcaataatcgacaaatgggggaacaactcaaaatgctggaacaccatcccgacgcgggaacgcagctttgccagatcggttttcttgtcattaaccacgataccatcgacggtgatttcaccttgctgcactggttcgaggccgttgacggttttaatcagcgttgatttgccggaaccagacgggccgcaaaccaccaccacttcgccttttttcacttcggttgagcagtcggtcagcacctgaaagtgaccataccattttgaaacatttttcagggtaatcattatgctgtccttcttttcaagtagctgaccaacaacgacgcgctaagactaataacgaaataaacaaatccggcaaataggatcatctcaacctgcgtaccatcacgctcaccaatggttgaggcggtacggaagaaatcggccagagataacacatacaccagtgaggtatcctggaacagtacgatgccctgagtgagcagaagcggcaccatcgcgcggaacgcctgcggcagaataatcagtttcatcgactgccagtgagtcattcccaacgccagcgcggcgctcgactgaccacgagaaatactttgaataccagcacggataatctctgaatagtaggccgcttcaaacattgaaaacgccaccatcgccgaaattaaacggatatcattttttggtgataatcccagcacgttttgcagaaaacctggcacgatcaggtaaaaccacagcaaaaccataactaaaggaatcgagcggaatacgttaacgtaggctttggcaaaccacgctacgggcgcaaagctggacaagcgcatcaccgccagcatggtgccccacaaaataccaattacgactgccgtgacggtgattttcagcgtgatcaccagcccgtcgagcagatatggcagggaagggacaatggaactccagtcaaactcgtacattatttgccccccatgttgccaggcaggcgaactttacgttcaaccagcgtcattaccagcatgataaccgcgttaatcaacacatacgccagcgtaatagcggtaaacgactcccaggcgtgggctgagtaatcaagcaatttacccgcctgcgccgccatatccaccagaccaatagtcgaggcgatggcggagtttttcaccaggttcatcatctcggaagtcatcggcgggacgataacgcgataagcattaggcagcagtacgtatcgataagcctgcggtagcgtcaggcccatcgccagcgcggcatttttttgcccacgcggcaacgactgaatggcggcgcgtacctgttcgcaaacacgggcggcggtaaacagccccaggcagagcatggatgaaaggaaaaactgaatattgggatccagctcggccttaaaccacatgccgattttctccggcaacagctccgggatcaccagataccaggtaaagaattgcacaatcaacggcacgttgcggaacagttcgacatacaacgtacccagaccggagagaaaacggtttggaacggtacgtaaaatgccgaaaaatgaaccgacgaggaaagcgataatccaggcgcagatcgacaaagcgatcgtcacctgaaaaccactccagatccaaccaagataggtggtgttgccgaacggggcttgttgtaaaaaaataccccagttccagtctatagacataaatctactccagaaaaaagagggtagcagcgttaactgctaccctcgaagattgttacccagcgtattgcggttttcaggcccgatggggaacgaccatcaggcgtatagtctgtccgtgctacgtaacaatcgagagggctggaatttccgcccctggttcttgtaattagttcagtgctttgtcattcggttctttgaacagtgctttcatttcgtctgacagttcgaaattcatgttcaggtttttcggcggaattggatttttgaaccatttatcaaaccatttttccgcttcaccggaagtctgcacctgagcgatagtgtcatccatcagctttttgaactgcggatcatctttacgcaacatgcaaccgtaggcttcctgagactgcggcttgccgacgatatcccagttgtctggtttcttcgctttcgcacgttcaccggccagcagggcatcatccatcataaaggcaacggcacgaccgctttccagggtgcggaaagagtcaccgtgatctttggcgctgatgatgcgcatattcattttttgctcttcattcagtttgttgagcaaaacttcagaggtagtgccggaagtgacgactacggctttgcctttcaggtcggcaaaatctttgatatcgccgccctttttggtcagcaggcgcgtaccgaccacgaaaatagtatcagagaaagccgcctgtttttggcgttcgacgttgttggtggtagaaccacattcaaaatcgaaagtgccgttttgcagcagaggaatacggttttgtgaggtaatcggaatcagtttcacctgtaagtccggtttgttgagtttctttttcactgcttcaacaatggcgttggagtaatcctgcgagtaacccaccactttttgctgattgtcgtaataagagaaaggcactgaagattcacggtgaccgacgacaatcacaccgtttttggcgattttgtccagcgtactgcccgctgccggggcggcgtcatctgcctgtgccagtcctgcggaaagcgccagggccaggattgctatggcaggtttacgtaattgcatatccaactcctttatcttctgcgttaagaacgcatggatacccgttgtgagtgtttgtgttgttatcgtctgcaactttattgtgcagtgttgtgcctgttaggtaacatttagtttggctaaatgtaaagatattgctgttttattgtttgtttttgcgagatgcgccgcaccattccgaagcaaaattcttaaaatgcactcttttggtgctaccgctgatttgtggtggtgcaacctggttgcgtcgcggctgatttcatcgcttacacagtaaataaagcaacttacatgccaaaaaatacttaggggcgaattaattacgattgtaattttaggctgaaaaagtcatatttcggacagggttaacttttcggtatgggacgtttgccgggatgataactgcacacgggaaaaatgctttttatctgtcttttcaaggaagaaacaccttatgtctgcatcttcggttaagccgttaaatgttcaattacccgcaataacccttatcctttttgcgctctgtgttgggatattttgttacctcgcacaatggatgagttatgaagaagtcgatcaatccgcactcatccatctcggtgctaacgttgcttcactctcgttgtcgggtgaaccctggcgcttattgagcagtgtctttctgcacagtagtttttcccatttgctgatgaatatgtttgcactcctggtggtgggggcagtgacggaacggatactggggaaatggcgacttctgattatttggttattctccggcgtctttggtgggctcatcagcgcctgttatgcgttacgcgatagtgatcagatagtcatcagcgttggggcatccggggcaattatgggaatagctggcgctgcgatagcaacacagcttgcttcaggtacgggcacacaccataaaaaccagcggcgagtatttcctctgttgggtatggtggcgctgacactgttgtacggtgcccggcaaacaggaatagataacgcttgccacattggcggcctgattgcgggtggcgcgttgggttggctgagcgcgcgtttatctgggcaaaaccgactcgttacggaaggcgggattattgttgcgggcagtcttcttctgaccggggctatctggcttgcgcagcagcagatggatgagtcagttttacaggtcaggcaaagcctgcgtgaagagttttatccgcaggagattgaacaagagcgacgacaaaaaaacaacagttagcggaggaacgcaacgtcctcagggaaacattatccgctccggtaagtcgtgaacaggccagtggtgatttgctcgctgagattgccgatatccatgatatggcgatcagtcgggatggtaatacgttgtatgccgcaattgaaaacaccaacagcattgttgttttcgacctcggacaaaagaaaatcctgcatacctttacagcccccatagcgaaagaaaagtcagtcaaacattgtggtggctgtaaagatcagggcgtcagatcgctgacgctaagcccggatgaaacgttgctttatgcgacttcatttgaagcgaatgcgttatcggtcattaacgtggcgacgggggagattattcagtcgattaccaccggtgcacatcctgacagtcttatcctctcgcgtgatggcacaaaagcctgggtgatgaatcgcaccagtaatagtgtgtcagcgattgatctggtgacttatcagcatgtggcggatatcccgctggagaaatacgacgggacggggacgagtaataaacctggtgcctgggttatggcactttccccggatgaaaaaatattgttgatacccggtatggtcagaggtgacattgtacgcatcaataccatcacgcatcagaaagaagactttcccgcaggtgatgcgcgtggaacgatatcggcgatgcgttttcgacctgaaaacggggatgtaatttttgccgacagccaggggatttcacgtataagagttggggatcaacaagccagcattatgacgcaatggtgtagcaggagcgtttattccgttgagggtattagcccggacggtcaatatttagtgttggtgtcatatggcctgcaaggttatgtcatcctgctcaatattaatgccgggcagattattggtgtttatcctgccagctacgttaatcaccttcgtttttcagcggatggtagaaaaatatttgtcatggcgaagaacgggttgatccaaatggacaggacgctctcgcttgatccgcaggcaattattcgtcatccccaatatggcaatgtggcttgtatccctgaaccgtaagaaaaaggggcatgataaccatgccccaaagctcaatgagaaagtacgttttgctcatgcaggatacatcaggcacatcaacgtttacgtgctcgcagactcatcagcacagcggcaaaaccaaacagtgccgtcagcacccacagcggccagttgccggtacgtgcgtacggtgtgagtccggtggtcggtgtcacattagtggtcaacacctcgcgggtgaactgcgggatcatcgcctgaatctccccctgcgggccaatcaccgccgtaataccgttattggtgctgcgcagtagcgggcgcgccagctccagcgcacgcattcgcgccatctggaagtgctgccacggaccaatagacttaccaaaccacgcatcgttagagatggtcagcagatagtcggtatccgggcggaaattatcgcgcacctgctcaccaagaatgatctcgtagcaaatagccgcagtaagctcaataccatttaccgacagcggcggctggatatatggcccacggctgaacgacgacatcggcagatcaaagaacggtgctaacggacgcagaatcgactccagcgggacaaactcgccaaacggcaccagatggtttttgttatagcgatcggctgattcgtagctgtacggtgcacctttacccagcgtgatgatggtgttgtaggtatcgtagcggttctgcttattgagacgcgcgtcgacaatcccggtgaccagcgagctacctttatcacgcaactcaccgtccagtgctttgaggaacggttgctgattaatttccagatcggttatcgccgactccggccagataatcaacgatgatttgcccatcagcggtgccgttgcgttgtagtaaatcttcagcgtattaagaagctggccttcgtcccatttcagcgattgtgggatatcgccctgaaccatcgaaacctgaatggttttctccggttgcggggtaaaccattggatgtaacgcagcgggaagggtagggcaaacagcacgacggccaccaccagcggacgccagttgcgtttgaccaacgccagtgccagcaggccactaaccatcatcagcaggaagttaatggcttccacgcccattatcggtgccagcccttttaacgggccatcaatctggctatagccgaactgtaaccacgggaagccggtcagtacccaaccgcgcagaaactcggtcacttgccagagggcaggggcagcaatcgccacgcgcagccaggtggttttcggccacagacgcgacagcacgccagcaaacagtccggtatacagcgacaaatacgccgccagcagcaccaccaggaagatgttaaccgggccaggcatcccgccaaaggtcgcgatgctgacatagacccagttaataccgctgccaaagaggccaaatccccagcaaaagccaatagcggcagactggagtgggcgacggttaaaggtcaacgcctgaagccccatcagcgaaataatcgccgcaggccagacgtcgtaaggagagaaggccagcgttccgcaggcaccgaataataacgccagcagcaggcgaatgcgctggcgttcaattaatgaggcaaaagccatgtagttatctatccagtttcggttttattcatccagctttggctggggtgagtcatccgggattttgacatgaacctgaataatacgccgactatcggccatcgccactttgaactggtaaccgtcgatgtcgatagtttcgccacgcgccggaagatgcccaaacgcctgcatcaccagaccaccgatagtgtcgacttcttcatcgctaaagtgggtgccgaacgcttcgttgaagtcttcaatggaagccagtgcgcgcacggtccaggtatgacgactcagctgacggaagtcgatatcatcttcttcgtcatactcgtcttcaatctcaccaacaatcagttccaggatgtcttcaatggtcaccagaccggaaaccccaccgaattcgtcaataacgatcgccatgtggtaacgctgagagcgaaactctttcagcatccggtctacgcgcttactttcaggaacgacaaccgcctgacgtaacactttgtccatgctgaaggcttcagcatcgctgcgcataaacggcagcaagtctttcgccatcagaatcccttcaatgtgatctttgtcttcgctaatcaccgggaaacgtgagtgggcggactcgatgatgacatcaaggcattcgtccagtgtctggttgcgtttcagggtaatcatctgggagcgggggatcatgatgtcgcgaacgcgttggtctgcgatgtccatcaccccttcgagcatatcgcgcgtatcttcgtcgataaggtcgttctgcccggaatcacggatcagcgccagcagttcgtcacggtttttcggttcaccgtggaaaagttggctgagtaacagggagaaaaatcccttcttgttgcttatcgtgtcactactgtgtgaattgtcgtcgctcatggcgtcgtatgggttctcatgttagttaatcaaaacgccgtcgttaatcaccaacggcggggacgtctgccagtcaaatgcctggcaaattattctttctcggcaatgtacggatcctcatagcccagagcaagcataatctctgtttcgagggcttccatttcttctgcttcgtcatcttcgatgtgatcgtaacctaacaaatgcagactgccgtgcaccaccatatgcgcccagtgcgcctccagtggtttgccttgctcctgagcttccttctcaaccacctgacggcagataaccagatcgcccagtagcgacatctccatgccaggcggcacttcaaacgggaaggagagcacgttggtcggcttatccttaccgcgataggtcagattcagactgtggctttcggcggtatcgaccacgcgaatagtcacttccgattctttctgaaactgcgggatcaccgcattcagccatgtctgaaactggctctcttccggtaacccggaattatcttcacatgccagttgtaaatcgaggatcacctgactcatttttgttcctgttcttcgcgcttgcgttctgccgccagcgccgcttttcgtttttgttctgcttcttcccaggcttcataagcgttaacgatacgcgccaccaccgggtgacgaaccacgtcttcgctgtggaagaagttaaagctgatctcttcgacatcggccagcacttcgatggcatgacgtaagcctgatttagtattacgcggcaggtcgatctgtgtgacgtcgccggtgataaccgcttttgagttaaaaccgatacgggtcaggaacatcttcatctgttcgatggtggtgttctggctctcatcgagaatgataaaggcgtcattcagcgtacgaccacgcatataggccagcggcgcgacttcaataacgttgcgctcaatcagtttctcgactttctcaaagcccagcatttcaaacagcgcgtcgtacagtgggcgcagatacgggtctactttctggcttaaatcgccaggcaggaagcccagtttctcaccggcttcgaccgccggacgagtcagcagaatacggcgaatttcctgacgctccagggcatcaactgctgcagcgactgccaggtaggttttacccgtacccgccgggccaacgccgaaggtaatgtcatggtcgagaatattggcgatgtactgcgcctggtttggcgtgcgcggcttaattacgccgcgtttggttttgatattgaccgctttgccgtactccggcacgctctccgcgctttgctccagtacccttgcttctttaatcgcaaggtggatctgttccggttcgatatcctgaatctgaccgcgcatcggggctgtatcgacatacaggctacgcagaatgtctgccgcagcggtgacgcaaatcggacggccggtcagtttaaagtggttgtcgcggcgattgatctcgatgccgagacggcgttcgagctgcttgatgttgtcatcaaacgggccgcacaggctcaacagacgcgcgttgtctgctggctccagggtgatttcgcgagtgtctatgttcaaaccgttcctcttatctgtatgccgccggaagctgaacattcaccggcctataaggaaattattcacgccacaggaaaaaggcgcaagcattgcgataaagatggggataaagagagaaaaaacaaggcccaccggaacggcgggcctgagaattacggctgataataacccacgccaaggtcgttttctttgcgggtacgggcaatcaccgattccggtgtttctgccacgcgcagacccatttcatcttcagtacgcaccactttaccgcgcagagagttcgggtagacgtcggtaatttctacatcgacgaatttaccgatcatatccggtgtgccctcgaagttgaccacgcggttattttcggtacgcccggaaagctccatgatgctcttacgcgatgtaccttctaccagaatacgctgggtggtgccgagcatccggcggctccacgccatcgcttgctgattgatacgttcttgcagaatatacagacgctgcttcttctcttcttccggaacatcatcaaccatatcggcggctggtgtacccggacgtgcagagaagataaagctgtagctcatgtcgaaattgacgtcggcaatcagcttcatcgttttctcgaagtcttcggtggtttcgccagggaagccgacgatgaagtcagaactgatctgaatatccgggcgcgccgcacgcagtttacggatgatcgctttgtactccagcgccgtatgggtacggcccatcaggttcagaatgcgatcggaaccactctgtaccggcaggtgcaggaagctcaccagctccggcgtgtcgcggtacacttcgatgatatcgtcggtgaattcgatcggatggctggtggtaaagcgaatacgatcgatcccgtcgatcgcagcaaccagacgcaacagatcggcaaacgatccggtggtgccgtcgtagttttcaccacgccaggcgttcacgttctgaccgagcaggttgacttcacgcacgccctgagccgcaagctgggcaatctcaaacagaatatcgtcggacggacggcttacctcttcaccacgggtgtaaggcaccacgcagtaggtgcaatatttattgcagccttccatgatggagacaaacgcggtcggcccttcggcgcgcggttccggtagacggtcaaacttctcgatttccgggaagctgatatctacaaccgggctgcggtcgccacgcacggagttgatcatcttcggcagacggtgcagcgtttgcggcccaaaaataatatcgacatagtgggcgcgctggcgaatgtgctcgccttcttgcgatgccacgcagccaccgacgccgataatcaggtctggattcttctcttttaacagtttccagcgacccaactgatggaagactttttcctgagccttctcgcggattgagcaggtgttcagcagcagcacatccgcttcttccgccacgtcggtcagttgatagccgtgggtggcatccagcagatcggccatcttcgatgaatcgtactcgttcatctgacagccccaggttttaatatggagttttttggtcatcgacttgctcttgcgaaatagtagccaggaatgcagggcgcatagtgtaatgctttgctgccgttgtgaccagtatgagcgttatcagcccttaggggtaaaaatcctgtaaacttaaagcatattgctaacaggatgattgaccatgacaaatcaaccaacggaaattgccattgtcggcggaggaatggtcggcggcgcactggcgctggggctggcacagcacggatttgcggtaacggtgatcgagcacgcagaaccagcgccgtttgtcgctgatagccaaccggacgtgcggatctcggcgatcagcgcggcttcggtatcattgcttaaagggttaggggtctgggatgcagtacaggctatgcgttgccatccttaccgcagactggaaacgtgggagtgggaaacggcgcatgtggtgtttgacgccgctgaacttaagctaccgctgcttggctatatggtggaaaacactgtcctgcaacaggcgttgtggcaggcgctggaagcgcatccgaaagtaacgttacgtgtgccaggctcgctgattgcgctgcatcgccatgatgatcttcaggagctggagctgaaaggcggtgaagtgattcgcgcgaagctggtgattggtgccgacggcgcaaattcgcaggtgcggcagatggcgggaattggcgttcatgcatggcagtatgcgcagtcgtgcatgttgattagcgtccagtgcgagaacgatcccggcgacagcacctggcagcaatttactccggacggaccgcgtgcgtttctgccgttgtttgataactgggcatcgctggtgtggtatgactctccggcgcgtattcgccagttgcagaatatgaatatggcacagctccaggcggaaatcgcgaagcatttcccgtcgcgtctgggttacgttacaccgcttgccgctggtgcgtttccgctgacgcgtcgccatgcgttgcagtacgtgcagccagggcttgcgctggtgggcgatgccgcgcataccatccatccgctggcggggcagggagtgaatcttggttatcgtgatgtcgatgccctgattgatgttctggtcaacgcccgcagctacggcgaagcgtgggccagttatcctgtcctcaagcgttaccagatgcggcgcatggcggataacttcattatgcaaagcggtatggatctgttttatgccggattcagcaataatctgccaccactgcgttttatgcgtaatctcgggttaatggcggcggagcgtgctggcgtgttgaaacgtcaggcgctgaaatatgcgttagggttgtagccttacaacattgccggatgcgtgccaaccgtaggtcggataagacgcggcagcgtcgcatccgacattgaaggataagacgtgtcaacatcgcattcgacattgaatgaacgcagaaaagcaaaaagctcgccgaagcgagcttttttaatgtggctggggtacgaggattcgaacctcggaatgccggaatcagaatccggtgccttaccgcttggcgataccccaactgggtgcacttacaaggtaagcgtcttgaataaattggctggggtacgaggattcgaacctcggaatgccggaatcagaatccggtgccttaccgcttggcgataccccaacaaattggttttgaatttgccgaacatattcgacacattcagaatttggtggctacgacgggattcgaacctgtgaccccatcattatgagtgatgtgctctaaccaactgagctacgtagccagattgtttcttcgatggctggggtacctggattcgaaccagggaatgccggtatcaaaaaccggtgccttaccgcttggcgataccccaataaccgggcggtgaaccgcttactcgaagaagatggctggggtacctggattcgaaccagggaatgccggtatcaaaaaccggtgccttaccgcttggcgataccccatccgtacaacgctttctggtgaatggtgcgggaggcgagacttgaactcgcacaccttgcggcgccagaacctaaatctggtgcgtctaccaatttcgccactcccgcaaaaaaagatggtggctacgacgggattcgaacctgtgaccccatcattatgagtgatgtgctctaaccaactgagctacgtagccatcttttttttcgcgataccttatcggcgttgcggggcgcattatgcgtatagagccttgcagcgtcaacctctttttcaaggaaaattgctcgaaagtgactgtttggttaggttgcgaacagcgtggcgctatattcgtcaattattgtttactttgtgttttttcccaccctacagccattcttttgtcatacaggatgaaattcggaatttaacaatagtggtgggaaattaatttatgaaatactggcctacagtgatgagttgtcaaacagtgatgtggcaaacccggaacatttccttactgcatatcagaatcaacaagcacctcaataactgaaacagccccggatttcaccggggctgtttcgcatttcttacttatacgccgactggtgaacaccaaccgcgcgaccagacggatcgtccattttcttgaacgcttcatcccattcgatcgctttagcggaagaacaagcgacggaaggaccgcccggcacgcactcagcggcgctcggaagcgggaatagttcttcaaagatctcccgatacaagtacgcttctttagaggttggcgtgttgtacgggaagcggaagcgggcagtttccagttgctgatcagaaacctgctgcgcagccacttctttcagggtgtcgatccaactgtaaccgacgccatcggagaactgctctttctgccgccaggccacgcttgcaggcagatacgcttcaaaacattcacgcaggatgtgtttttccattttgccgttaccgcacattttatcctgtgggttaatacgcatcgccacatcaaggaattttttgtcgaggaacggaacgcgtgcttccacgccccaggctgacatcgctttgttggcacgcgcgcagtcatacatatgcagggccagcagtttacgcaccgtctcttcatgcagttctttggcattcggtgctttgtggaagtaaagataaccgccgaacacttcatcagaaccttcaccggacagcaccattttaatgcccatcgccttgatcttacgcgacattaaatacatcggtgttgaagcgcgaatagtggtcacatcataagtttcgatgtggtaaatcacgtcgcggatggcatccagaccttcctgtacagtgaagtgaatttcgtgatgcaccgtgcccagatggtttgccacttcctgggctgctttcagatccggtgaacccggcagacctacagcaaaggagtgtaactgcggccaccaggcttcagagcgttcctgatcttccacgcgacgggctgcgtatttcttggtgatagcggaaataattgaggaatccagaccaccagaaagcagcacaccgtaaggcacatcagacatcagatggcttttaactgaatcttccagtgcctgacgcagctcgtttttgtcggtcacgttatctttcaccgcatcgtagtcgaaccagtcgcgatgatagtaagaacggatttcgccgtcctggctccacaaatagctccccgccgggaactctttaatcgtgcggcaaactggcaccagcgctttcatttctgaggccacatacagctgaccgtgttcgtcataccccatatacagtgggatgatccccagatggtcgcgaccaatcaggtaggcatctttttcgctgtcgtacagtgcaaaggcaaacatgccctgcaagtcgtcgagaaattccggccctttttcctgatacagcgcgaggatcacttcacagtcagacccggtctggaactggtaacgatcgccatattcggcgcgcaatgcctggtggttgtagatttcaccgtttaccgccagtacgtgggttttttgttggttgtagagaggttgcgcccccgcgttaacgtcaacaattgacagacgttcgtgggcgagaatggcgttatcgctggcataaataccggaccagtccgggccacgatgacgcatcaggcgtgacagctcgagggctttcttacgcagctcaactgcgtctgttttgatatcgaatacgccaaaaattgaacacataaccttctccgttaacctggtatttgttgcttgttgtgtttgcttgtttaaaaaaatgccgcaaagcagcactgtgcgcaagcgatttggcggtgaaaaaataaaaaacgtaatggtgattgtcgattggtgaaaaaaggtctggtgtaaggatgtatttattgatgaatcgataatttttagcgggttttattgaatggttatattttacgggggccaaattgctgacaaagtgcaatttgttcatgccggatgcggcgtgaacgccttatccggcctacaaaagcatgaaaattcaatatattgcaggagctgcgtaggcctgataagcgtagcgcatcaggcagtttggcgtttgtcatcagagccaaccacgtccgcagacgtggttgctattcagataacgtcgatttcagcgaccgatgggtaaatccaacttgggcggaacggcatactgtcgatatcgtcgagcgacgaaacaccagaaagcaccagaatcgtctccagacctgcctggaagcccgccagaatatcggtacgcaggttatcgccgacaatcaccgtttcttccgaatgcgcctgcattttgtttaatgccgcgcggatgatccacgggctgggcttaccaacatagaacggtttgcgcccggagattttctcaatccctgcacacaacgcgccacaagcgggataaaaaccgcgcccgtgggtgtccggattggtggcgataaaacgtgcaccgttagcgacgaaataggctgctttatgcatcatgtcccagttgtaggaacgcgtttcgccaacaatcacgaaatcagggttcacatcggtaatagtgaaaccggctttgtacagttcatgaatcagtgcgccttcgcccaccacatacgctttcttgccttcctggcgacgcaggaaatcggcagtcgccatcgcagaggtataaaacacgctgtcaggtacatcgacacctgcggtggcaaagcggttcgccagatcttgcccagtctgcgaaggatagttggtcagcaacaccagcggcaagcctttatccataatcccgtgcaaaaattccgctgcacccggtacggcgacgttatcgtgcatcagcacgccgtcgatatcgcaaattacatttttaatggtcatggactacccagaatattgacaacaataagcgccactataaaagcacattaattttccagcaaatgctggagcaaaataccgttgagcatggcgcgttttaccagcgcaaaagcgccgattgccgagcggtgatccagctcagaacgtaccaccggcagattagtgcgaaacgccttcagcgcctgggtattaatgcagctttcaatagcagggagcagcactttatcggcttcggtgatttcaccggcaataacaattttttgcggattaaataagttgatagcaatggcgatggttttacccagatgacgaccgacatactcaattacttccgacgccagactatcgcctttgttcgcggctttgcagatagttttgatggtgcagtcgtccagcggcacgcggctctggtagccctgctttaacagattcaacacccgttgttcaatggcagcgttggcggcgatagtttccaggcagccaaagttgccgcagtggcagcgttcacccagcggttcgacctgaatatggccaatttcaccgacgttgccgttgcggccaataaaaatgcgcccgttagagatgattccggccccggttccgcgatggacacgcactaaaatggagtcttcgcaatcctgacttgcaccgaagtagtgctccgccagcgccagactacggatatcgtgaccaacgaaacaggtcactttaaaacgttcttccagagcttctaccagcccccagttttctacctgaatatgcggcatgtaatgaattttgccgctgtccgggtcaacaagtccaggcaggatcacggaaatggcgatcagctcgcgcagcttgcgttggtagctatcaataaactgagcaatggcattcagcagggcatgttccagcgtctgctgggtacgttccggcagcgggtaatgttcttctgccagcactttgctgctgagatcaaacagagtaatggtggcgtcgtgacgaccaagccgtacaccgattgcgtggaaattgcgggtttcggtgacgatagagatagcgcggcggcccccggtggaggcctgctgatcaacttctttgatcagcccgcgttcgataagctgacgcgtaattttggttacgctggcgggggcaagctggctttgctcggcaatctgaatccgcgagattggcccgtactggtcaatcaggcgataaaccgccgcgctgttaagctgttttacgagatcaacattacctatctgagcttgtccgcctggtgtcatactttctcttattgagttacgacctcgttaccgttaacgatggtcctggtgattttaaaatcaggtgtgaatgcggtcaggttggctactttacctgcggcgagtgtgccgagacgtttctcaacgccaatcgcacgcgccggatagagcgtcgccatacgcagcacttcatccagtgcgataccgcaatgttcgaccagattacgcacgccttcaatcatggttaaggatgaaccgcttaacgtaccgttctcatccacacaaagtccgttacggtagtatattgttttacccgcaaaaatgaactgttcaatgttggcacctgctggcgcggtggcgtcggtaaccagacacagtttgtcgcctttcaggcgtttagcgttacgaatgttggcgtaatcaacatgcaggccatcagcgataataccgcaataaatgtcagcttcgtcgaggatcgcgcccgccaggcccggttcacgaccggtaatatacggcatcgcgttgtacagatgggtggcaaaggtaacccccgcgcggaaaccggctttcgcttctttcaacgtcgcgttggagtgaccggcagaaaccacaatcccggcatttgccagtttgctgatgacttctgcaggaaccatttccggtgccagggtcactttagtaatgacgtcggcgttcttacacaggaaatcgaccagcgcggcatcaggcttacgcacaaaattcggattatgggtgcctttttttaccagattcagccacggaccttccagatgcagacctaacgcctgattcggatgttttgccaggtactcgcgcataacgcgcacgccctgtttcatcagctcatcgctggtggtgataagcgtcggcagatagttagtacagcctgatttctcattggcgttctgcatgatttccagcgtttccacgctgaccgcttcagcggtgtcgttaaactgtacgccgccgcagccgtttaactgcacatcgataaaaccgggggagagaatggccccgttcagtgaacgttgttcgatctctggcggcagttccgctaccggacagacgcttttaatcaggccatcagcgataacaaccgcgtggtcatcaagaaattcgtggccggtaaagatccggccctgggttaatgcatacattctgacccccgattttaaaaaatattgccctgagcaaggagccagggcagggataacaattacagacctttgatattttctgcttctaattcattgaaatatcttaaagtcttaactttcagctccatggtggaaggttcatcgcataccatgatcgcttttggatgcagttgcagacagctgatggtccacatgtggttcacgcaaccttcaacggcggcctgcagtgccagtgctttctggctacccagcaccagaatcatcacttcttcggcatccagcaatgtaccaacaccgacagtcagggcatattttggcacctgattgacatcgttatcaaagaaacgagagttcgcgacgcgagtgtcatgagtcagggttttgatacgagtacgagaagccagagaagacgccggttcgttaaatgcaatatgaccgtcgttacctacaccgcccataaacagatgaatttttccgtaagaacggattttttcttcatactggcggcactcggcgtcgatatccggggcgttgccgttgagaaggttgatgttttctgctggaatatcaacgtgatcgaagaaattacggtgcataaagctgtagtagctttccggatgctctttcggcagaccgacatattcgtccatgttgaaggtgacaacgtgcttaaagctgacctggcctgctttatgcatttcgactaacgctttataggtggtcattggcgtgccgccagttggcaggcccagaacaaacggacgatcggcagtcggtttgaacgcattgatacgattgacgatatggcgagcagcccatttaccgacctgttcagcggtagtcagggggatcagtctcattattcacctcaataagtaaaatgtaagccgttggcggattaggcatctttaagcgtaacctggatttgcgcagacaggcgtcaatccgacctgattttttgaatgataaaataagttttctggtttagccagtaaaagggagtgatgataacgatatttggtgacaaaactcacaaaagacacgcgtttaatttgcgatacgaattaaattttcacacactctgtagcagatgatctaacaatctgattacagaacatcggcagtacaatttgcagcaaaataaaaatacggctttaaacgagccaaatagggttctcgtagggggaataagatgaatattttaggttttttccagcgactcggtagggcgttacagctccctatcgcggtgctgccggtggcggcactgttgctgcgattcggtcagccagatttacttaacgttgcgtttattgcccaggcgggcggtgcgatttttgataacctcgcattaatcttcgccatcggtgtggcatccagctggtcgaaagacagcgcaggtgcggcggcgctggcgggtgcggtaggttactttgtgttaaccaaagcgatggtgaccatcaacccagaaataaacatgggtgtactggcgggtatcattaccggtctggttggtggcgcagcctataaccgttggtccgatattaaactgccggacttcctgagcttcttcggcggcaaacgctttgtgccgattgccaccggcttcttctgcctggtgctggcggccatttttggttacgtctggccgccggtacagcacgctatccatgcaggaggcgagtggatcgtttctgcgggcgcgctgggttccggtatctttggtttcatcaaccgtctgctgatcccaaccggtctgcatcaggtgctgaacaccatcgcctggttccagattggtgaattcaccaacgcggcgggtacggttttccacggtgatatcaaccgcttctatgccggtgacggcaccgcggggatgttcatgtccggcttcttcccgattatgatgttcggtctgccgggtgcggcgctggcgatgtacttcgcagcaccgaaagagcgtcgtccgatggttggcgggatgctgctttctgttgctgttactgcgttcctgaccggtgtgactgagccgctggaattcctgttcatgttccttgcaccgctgctgtacctcctgcacgcactgctgaccggtatcagcctgtttgtggcaacactgctgggtatccatgctggcttctctttctctgcgggggctatcgactacgcgttgatgtataacctgccggccgccagccagaacgtctggatgctgctggtgatgggtgttgtcttcttcgctatctacttcgtggtgttcagtttggttatccgcatgttcaacctgaaaacgccgggtcgtgaagataaagaagacgagatcgttactgaagaagccaacagcaacactgaagaaggcctcaatcaactggcgaccaactatattgctgcggttggcggcactgacaacctgaaagcaattgacgcctgtatcacccgtctgcgccttacagtggctgactctgcccgcgttaacgatacgatgtgtaaacgtctgggtgcttctggtgtagtaaaactgaacaaacagactattcaggtgattgttggcgcgaaagcagaatccatcggcgatgcgatgaagaaagtcgttgcccgcggtccggtagcagctgcgtcagctgaagcaactccggcaactgccgcgcctgtagcaaaaccgcaggctgtaccaaacgcggtatctatcgcggagctggtatcgccgattaccggtgatgtcgtggcactggatcaggttcctgacgaagcattcgccagcaaagcggtgggtgacggtgtggcggtgaaaccgacagataaaatcgtcgtatcaccagccgcagggacaatcgtgaaaatcttcaacaccaaccacgcgttctgcctggaaaccgaaaaaggcgcggagatcgtcgtccatatgggtatcgacaccgtagcgctggaaggtaaaggctttaaacgtctggtggaagagggtgcgcaggtaagcgcagggcaaccgattctggaaatggatctggattacctgaacgctaacgcccgctcgatgattagcccggtggtttgcagcaatatcgacgatttcagtggcttgatcattaaagctcagggccatgttgtggcgggtcaaacaccgctgtatgaaatcaaaaagtaatctgctttatgcctgatgcgacgcttgacgcgtcttatcaggcctacaaaagctcagtccaggttggataagacgcttaagcgtcgcatccaacaatgacgcaggactggcaaaagcggtggagatcttctctgccgctttttttttcatcaatcatccccataatctcagtgagattttcgattttcactaactaacagttgtcagcctgtcccgcttataagatcatacgccgttatacgttgtttacgctttgaggaatccacgatgagtgaggcagaagcccgcccgactaactttatccgtcagatcatcgatgaagatctggccagtggtaagcacaccacagtacacacccgtttcccgccggagccgaatggctatctgcatattggccatgcgaaatctatctgcctgaacttcgggatcgcccaggactataaaggccagtgcaacctgcgtttcgacgacactaacccggtaaaagaagatatcgagtatgttgagtcgatcaaaaacgacgtagagtggttaggttttcactggtctggtaacgtccgttactcctccgattattttgatcagctccacgcctatgcgatcgaactgatcaataaaggcctggcgtacgttgatgaactgacgccggaacagatccgcgaataccgcggcaccctgacgcaaccgggtaaaaacagcccgtaccgcgaccgcagcgttgaagagaacctggcgctgttcgaaaaaatgcgtgccggtggttttgaagaaggtaaagcctgcctgcgtgcgaaaatcgacatggcttcaccgtttatcgtgatgcgcgatccggtgctgtaccgtattaaatttgctgaacaccaccagactggcaacaagtggtgcatctacccgatgtacgacttcacccactgcatcagcgatgccctggaaggtattacgcactctctgtgtacgcttgagttccaggacaaccgtcgtctgtacgactgggtactggacaacatcacgattcctgttcacccgcgccagtatgagttctcgcgcctgaatctggaatacaccgtgatgtccaagcgtaagttgaacctgctggtgaccgacaagcacgttgaaggctgggatgacccgcgtatgccgaccatttccggtctgcgtcgtcgtggttacactgcggcttctattcgtgagttctgcaaacgcatcggcgtgaccaagcaggacaacaccattgagatggcgtcgctggaatcctgcatccgtgaagatctcaacgaaaatgcgccgcgcgcaatggcggttatcgatccggtgaaactggttatcgaaaactatcagggcgaaggcgaaatggttaccatgccgaaccatccgaacaaaccggaaatgggcagccgtcaggtgccgtttagcggtgagatttggattgatcgcgccgatttccgcgaagaagctaacaagcagtacaaacgtctggtgctgggtaaagaagtgcgtctgcgtaatgcttatgtgattaaggcagaacgcgtcgagaaagatgccgaaggtaatatcaccaccatcttctgtacttatgacgccgataccttaagcaaagatccggcagatggtcgtaaagtcaaaggtgttattcactgggtgagcgcggcacatgcgctgccggttgaaatccgtttgtatgaccgtctgttcagcgtgcctaacccaggtgctgcggatgatttcctgtcggtgattaacccggaatcgctggtgatcaaacagggctttgctgaaccgtcgctgaaagatgcggttgcgggtaaagcattccagtttgagcgtgaaggttacttctgcctcgatagccgccattctacggcggaaaaaccggtatttaaccgcaccgttgggctgcgtgatacctgggcgaaagtaggcgagtaattttaagtttcgctatgccggatggggcgtttacgtcgcatccggcaaggaacagataaacagtttcaaacgctaaattgcctgatgcgctacgcttatcaggcctacatgatctctgcaatatattgagtttgcgtgcttttgtaggccggataaggcgttcacgccgcatccggcaagaaacagcaaacaatccaaaacgccgcgctctgtggcgtttttttctacttttctacgcgaattaatcctgcttcgcaatttatccataaaataaatttaaaataacaaaacataattaaataaaatgtaaccgctttcatcttgctggaaattcacgcttttattcttctgcaagcctttcaaccgcaaacttaagccttgtaacaaaaatcatcaaaatatgtgcggttgctcatgttcttacattctggttacagaaagagattgataattcgcgtcgcgaaaaatagtctgttcctgtagtcagcgagacttttctcaacgctgctttttaaatttttattttttttcgctgttcacctttggtgcagcaatttatacgtcaaagaggattaacccatgcgtacgtttagtggcaaacgtagtacgctggcgctggctatcgccggtgttacagcaatgtcgggctttatggcaatgccggaggctcgcgccgaaggattcatcgacgattcaaccttaaccggcggtatctattactggcagcgtgaacgcgaccgtaaagatgttaccgacggcgacaaatacaaaaccaacctttctcactccacctggaatgccaacctcgattttcagtctggttatgctgctgatatgttcggccttgatattgccgcgtttacggcgattgaaatggcggaaaacggcgacagctctcacccgaacgaaatcgcgttttcaaaaagtaataaagcctatgacgaagactggtccggcgacaaaagcggtataagcctgtataaagcagcggccaaatttaaatacggtccggtttgggcgagggcaggttatattcagccaaccggtcagacgctgttagcgcctcactggagctttatgccgggtacttatcagggtgcggaagccggagcgaattttgattacggcgatgccggtgcgttgagtttctcctacatgtggaccaacgaatacaaagcgccgtggcatctggaaatggatgagttttatcagaacgataaaaccaccaaagttgattatctgcactcccttggggcgaaatacgacttcaaaaataacttcgtactggaagcggcttttggtcaggcggaagggtatatcgatcaatattttgccaaagccagctacaaatttgatatcgccggtagcccgttaaccaccagctaccagttctacggtacccgcgataaagttgacgatcgcagcgtcaacgacctttatgacggcaccgcctggctgcaggcgttgacctttggttaccgggcggctgacgtagtggatttgcgcctcgaaggcacctgggttaaggctgacggtcagcagggatacttcctgcaacgtatgactccaacctacgcttcctcaaacggtcgcctggatatctggtgggacaaccgttctgacttcaacgccaacggcgaaaaagcagtcttcttcggtgcgatgtatgacctgaaaaactggaatcttccaggcttcgccatcggcgcttcctacgtttacgcatgggatgctaaacctgcgacctggcagagcaatccggatgcgtactacgacaaaaaccgggctattgaagagtctgcatacagcctggatgcggtctacaccattcaggacggtcgcgccaaaggcacgatgttcaaactgcatttcaccgaatacgacaaccactccgacatcccaagctggggcggtggttacggcaacatcttccaggatgagcgtgacgtgaaatttatggtaatcgcaccattcaccatcttctgatgcccgacgcggcaggttttgtgcctgccgcatatttgaggaatttgctatgaaaaaactgattctcatcgccatgatggcatcggggctggtggcttgtgcgcaatcaaccgcgccacaggaagacagccgtctgaaagaggcatacagcgcctgtatcaacaccgcacaaggttcgccagaaaaaattgaagcctgccagagcgtgttaaacgtgctgaagaaagagaaacaacatcagcagtttgccgaccaggaaagtgtacgcgtactggattatcagcagtgtctgcgtgcaacgcaaaccggaaatgatcaggcggtgaaagccgattgtgataaagtctggcaggaaattcgcagtaataacaaataagtgagagctgtaactctcgcttttcttatttcccttgcataaaaaagccaacccgcaggttggcttttctcgttcaggctggcttatttgccttcgtgcgcgtgctcatcttcgcggcaatcgccttcggcacagtgaccgtaaagatagagactgtggttagtcaggcgaatgccatgttttgcggcaatttcacgctgacgcgcttcgatggaatcatcactaaattcgataaccttgccgcagtcgaggcagatcaggtgatcgtggtgatgttgctgtgtcagttcaaatacggatttaccgccttcaaaattgtggcgggtgacgataccagcgtcgtcaaactggttcagtacgcgatataccgtagccagaccaatttcttcacccatatcgatcagacgtttgtataaatcttccgcactgacgtgatggttgtccggctcctgaagaacttccaggatttttaaacgaggaagcgttactttcaggccagctttctttagggcggtattgttatcagtcatgcggaatctgtcctgttactaagcggttcacttcattagaagaagtgacagaatttgctcttgagataatgcgtatcattatagaattgccacgcctaaatgaaaaccacaagtccctggcaaatattgttaataaaaacgtggcatagcttacatttacaacggcaaggccacttgaacaccgggacattgtacaggtacaacagcaaaagttacaaatttgtagcaattattttgattggcattatctattaatacggcgtagacatgagtctacgccgcatcacatcaggcattgagaatttcgtcgagatgcaactcttcagaaatctgtttaacccatttttctacacgttcagcggtcagttccggctgacggtcttcgtcgatagccagaccgacaaagtggtcgtcatctgccagaccttttgatgcttcgaaatgatagcccgcagttggccagtgaccaacgatggttgcaccgcgcggttcaatgatgtcgcggatggtgcccaatgcgtcgcagaaatattcggcgtaatcttcctggtcaccacaaccaaacagcgcaaccagtttgccattgaaatcaatctcttcgagagtcgggaagaagtcatcccagtcacactgcgcttcgccgtaataccaggttgggatgcccagcagcagaatgtcataagcttccagatcttctttgctgctttttgcaatgtcatggacatcggcaacgtctttaccaagctgtttttgaatcatttttgcgatattttcggtattaccggtgtcgctgccgaaaaagatgccagtgatagccatgagtgaaataacctcttgaaacttattgaaatgggggtggaaaattgcccacggataaaggcaatcatagcagaacaggcagtcttgcggaatcagcaaacgagcaggactgcacactgtgctacatgaaagtggaaatttaaacgatgccctgactacgcagcgccgccagttgctgcattaacatctcttcgatcagttcgctacggctcatattgcgcgattccgccagctcgttcagcgcctcgacagcttccgcgttcagcttcagttcgacacgcttaaggccacgtactttgtcgcgttttagttggttgcgtttattaatacgcagctgttcatcgcgcgaaagcggattagttttcggtcgtcccggtcgacgctcgtgcgcgaacagatctaatgtcgtacggtccgtttgttctttggccatgatcttggtgacttcgggggaaacaatcagccaggcctctgcccggatggatagcgcgccataatacatcagcgcgatgagtcacgccaacgcccacgcgcggaaagcgacgcggacgctgggtttttaatcagttgcgttaatcattgagatagcgacggatagcgcgtaataccgcatctggtttttcagcatggacccagtgacccgcgcctgcaatgacatgcgcccgtgcctgtggaaattgtgccagtaaatcatcacggtactgctcgctaacatacggagaattaccaccagggataaacagggcagggtgatcccatgccgggattttctcccaacccacaatatgcggatactgatcccacaataccggcacgttaaagcgccactccccgtcaacaaaagatttcaacagaaactgaatcaccccttcttcattaagatgctggcgcattattgctgctgcttgctggcgagtttgtgcgtccgattcactgaccgcgttgatagctgcgaaaatctcatcatgacggcgtacgtgatagtcgaccggtgcgatatcgatcgccaccagtttatcgatgcgatcgggggccagtgcagtaagtgccattaccgctttaccgcccatggagtgaccgataaatgttgctttgtcgatctgcagtgcatccagggtatcaacaagatcctgcgccatcgccgggtaattcattaccggctctctcggtgaaagaccgtggttacgcatatcaacctggatgatattgtgatcgtttaccagatcgcgagccagtacgccaaggttgtcgaggctaccaaacagaccatggacaagaacgatgggagaattattgtgctggttttgtgcagtttgcgcgcggatattcaatttcatggcaaagttctttttttcgcgttgtcgggttagggtattatgttgaccattgtgccacagggctgcaacaaataaggtttattccgagtttttctgcaagccaggcttgacgctatccgctgccgggatttattcatatactcctggcgacttgtattcagctaagacactgcactggattaagatgaaaacgattgaagttgatgatgaactctacagctatattgccagccacactaagcatatcggcgagagcgcatccgacattttacggcgtatgttgaaattttccgccgcatcacagcctgctgctccggtgacgaaagaggttcgcgttgcgtcacctgctatcgtcgaagcgaagccggtcaaaacgattaaagacaaggttcgcgcaatgcgtgaacttctgctttcggacgaatacgcagagcaaaagcgagcggtcaatcgctttatgctgctgttgtctacactatattctcttgacgcccaggcgtttgccgaagcaacggaatcgttgcacggtcgtacacgcgtttactttgcggcagatgaacaaacgctgctgaaaaatggtaatcagaccaagccgaaacatgtgccaggcacgccgtattgggtgatcaccaacaccaacaccggccgtaaatgcagcatgatcgaacacatcatgcagtcgatgcaattcccggcggaattgattgagaaggtttgcggaactatctaaaacgttgcagacaaaggacaaagcaatggcaatccacaatcgtgcaggccaacctgcacaacagagtgatttgattaacgtcgcccaactgacggcgcaatattatgtactgaaaccagaagcagggaatgcggagcacgcggtgaaattcggtacttccggtcaccgtggcagtgcagcgcgccacagctttaacgagccgcacattctggcgatcgctcaggcaattgctgaagaacgtgcgaaaaacggtatcactggcccttgctatgtgggtaaagatactcacgccctgtccgaacctgcatttatttccgttctggaagtgctggcagcgaacggcgtagatgttattgtgcaggaaaacaatggcttcaccccgacgcctgccgtttccaatgccatcctggttcacaataaaaaaggtggcccgctggcagacggtatcgttattacaccgtcccataacccgccggaagatggtggtatcaagtacaatccgccaaatggtggcccggctgataccaacgtcactaaagtggtggaagatcgtgccaacgcactgctggccgatggcctgaaaggcgtgaagcgtatctccctcgacgaagcgatggcatccggtcatgtgaaagagcaggatctggtgcagccgttcgtggaagggctggccgatatcgttgatatggcggcgattcagaaagcgggcctgacgcttggcgttgatccgctgggcggttccggtatcgaatactggaagcgcattggcgagtattacaacctcaacctgactatcgttaacgatcaggtcgatcaaaccttccgctttatgcaccttgataaagacggcgcgatccgtatggactgctcctccgagtgtgcgatggcgggcctgctggcactgcgtgataagttcgatctggcgtttgctaacgacccggattatgaccgtcacggtatcgtcactccggcaggtttgatgaatccgaaccactacctggcggtggcgatcaattacctgttccagcatcgtccgcagtggggcaaagatgttgccgttggtaaaacgctggtttcttctgcgatgatcgaccgtgtggtcaatgacttgggtcgtaagctggtagaagtcccggtaggtttcaaatggtttgttgatggtctgttcgacggcagcttcggctttggcggcgaagagagcgcaggggcttccttcctgcgtttcgacggcacgccgtggtccaccgacaaagacggcatcatcatgtgtctgctggcggcggaaatcaccgctgtcaccggtaagaacccgcaggaacactacaacgaactggcaaaacgctttggtgcgccgagctacaaccgtttgcaggcagctgcgacttccgcacaaaaagcggcgctgtctaagctgtctccggaaatggtgagcgccagcaccctggcaggtgacccgatcaccgcgcgcctgactgctgctccgggcaacggtgcttctattggcggtctgaaagtgatgactgacaacggctggttcgccgcgcgtccgtcaggcacggaagacgcatataagatctactgcgaaagcttcctcggtgaagaacatcgcaagcagattgagaaagaagcggttgagattgttagcgaagttctgaaaaacgcgtaaacacatttaataaaaaaagggcggtcgcaagatcgcccttttttacgtatgacaaacacagaattgcctgatgcgctacgcttatcaggcctacgaggatggtgcaatatattgaatttaagcgattttgtaggccggataaggcgttcacgccgcatccggcaaaaacaacgaacactttgtcaacaaactgagtagctcaaggaaatcccaatgaagaccaacaggagtctggtcgtcatagtgtcactaattaccgccacattactgctgactgcatgcgcccaacctgaacaatcatcattagctggcgactggttactgacccctaaagataaaaccagaggattaacgggtagcattgcggtaaatattgcacctttccggtgtaagacaaattgccgtggtgataacttacctgataatacccgccgctggcagttgtcaggcgggaacgaaaaagaacttacttatcttcataatatgtcagcacaagaaaaggtcggtttaaatcccggttggcaatgctacacctcattttttatgcgggtttgccagggcaagcccggcactcgaccgatagtcaatgaggattatgtcagcgaaagcggattttttggctcgatgatgcatgtcgggattattgagttacgacgctgccagtcagaaaattgccagcaagaattgaaagcgataaatacacattaaaatagtgagtccgggaatgaaacccggacctgaacatgtcttattgcgtgaatgtttctttcatttgatactgcatttcccagagttcagtaagcgaaataacttttcttgttcttgcttcttcactttgtacccataagaaagggtagaacgtgaaggcttccgttgccgataattttattacgtcttctcgccattgctgccatcgtacattttcatagaaggtatctaaatcaccggataatgcccactgaagaaactcagaatatccaacttccagactttcccaattcagcgtatctggcgcaaaataataaacgcagccagtatcttccccaagatcgccaccattaagagcaaaaattccccctgcgacatcgtcagcgatgggtaaagcccgcacgcctgcgaattcagggcgttgtgtccaacttactggatctcgtggcaaccgggggtgaccagatcctgctatgcgtaaccaaccattatcaatcagcagacctccggagccatagacaagcgcacccatcggtgattttgttgtcacctgtaattgataaagtgcggtttcggctaaatctttattaaccggtaagagttcggtatggtttgtggcgtcttttaaccagttctggattattggccaggctgaatcttcagtatttactaactgattcatttcacgcatcgctacttgctccttgtgtgctacggtgtcatttatgatgaggaattgtatggaacattttttaaatattaagttccttatatttgaataaaaaatgactttatccatacattgccacttttttcaaagcataaaccgatacccaataccggtttcagtaataaaatggcgaggccgggccggatcctgttccagtttttgtcgcagatgccccatataattacgcaaatagttgctgtgttcgatcgcgtttagaccctacatctgccggatgcggcataaataacgaactatttgccaacaaacagaaagggcgatcattcaatcgcccttttttactttgttttattaaccgtgtttatttttcagttcaaagcgtggtgataccagaccatacagtgtccaaccaaggaaggtcacgatggaaccgtacagcatggcttcttccccggatgagtacagcgcataaaagctatacatcgcgccaacaaaagcaacaaagtttgcaactttcgcttttgaggggggcacattagcgaccttctgaataatgactaatgccgccattgacagaatatacggaatgatattggtcaccacggccaggttaaccagcacgttgaactgactgtttagcgacgggctaatggtcatcagtgccaatccactctgaataatcacaatggtcaacattccctgcaccggtgcatccactttggttacacgggagaaaattttagggaagtagccttcatcagatgaagatttaaacacctgggcaatggtgaactgccagccaagtagcgaaccgcagcaggacatcaccatcagcgccataatgactttacccacttccggcgtgaacatctgcgcgaaggccagaccaaatggtgccgttgaatttgccagctccatatttggcacaatcccggcaatcacgttggtggagacgatataaatcaccgccgcacctaacgtaccgccgagtaccgcgattggcacattacgttccgggttttccactacatcagtattcgcacacgcagactccagaccaagaaaagcccacagcgtcatagcgatggaagaacctaccgcactgaagaacggtgcatgatgcggattccaggaatcaacgtacagcgtcgggctaaaccagaaccagccaataatgcacagaccgacgaccggaataatgaccccccacacggtaatgctactgatttgcccggtaatgcgcgcaccaccaaagttagccacggtacaaatccacagcaccccgatggtcgcaagaccaatctgcactggcgacaaactcgcgccgagcagttcggtgccgtaaccaaccgccgaaatagcaatcgcgacgttagcaatcagcagtgagacgccgtaggtatagttcgccataaagttaccggatttaccgaaagcatactcggcataaccgcccataccgcctgatttacggctgaacataccgcattttgcgaatgcccatgccagtgccattgagcctacggctgtcaccagccaggagataattgagattgtcccgacttcggcaagctttgtcggcagcatgatgataccggagcccatcatgttgaccatcgtcagtatggttaactgaacgacgcccattttgttcgatttagcctgactcataatttttcccctttcaacagggtgctttgcgcatcacgaggcttgatgacatagcaccaaacttgcttacgaccatcatgttcttcgatatagacaccctgcagctccggtgcaaaacctggcagcaggttgatcccttcttccagagcgctgaagtaacgcagaacagcaccaccccagatttcacccggaacaacacacagcacacccggaggataaggaagcgcaccttcggcagcgatacggccttctgcatccggcagacgaaccagttccacttcaccgcgtaaataggcgtagttggcttcttgcggattcatgctgacgcgtgggaagtgctccttacggaacatctctttttgcagttgtttcacgttgtggcgggcatacaaatcatgcatttcctgacacaactgacgcagggtataaccggcgtagcgctcttcatgctgtttgtagatggaaggtagcacttctgctaatggcgcgtcggactcaagcagtttttcgaagcgtaccagcagggcaacaagttgctgaagtttggccatatcttctgccggagtcagcaggaagaggatggagttaagatcgcatttttccggcactacgccattttcgcgcaggaagttagcaagaatcgtcgcgggtacaccgaacgcttcatattcgccgttacgtgcatcaatacctggggttgtcagcaacagtttgcatggatcgacaaagtattgattctctgcatagccttcaaaagaatgccagtgttcccctggtacaaactggaagaagcgcagatcaaccgcaatttgcgctgtttcatacgactgccagggtttaccatccaccagttcaggtacgaacggacgaatatgctgacagttatcgaggatcagtttgcgggcattaatgccatttaccacacaatccatccacatattacgaccgctgacaccttcatgcattttggcgttgatatccagtgcggcaaacagcggatagaacgggctggtggaggcgtgcatcataaaggcgttgttcatgcgtttgtgcggtacataacgctgttgccctttgatgtggctgtcttttttatgaatttgtgaagtctgagaaaaaccagcctgttgtttatgcacagattgcgtaaccagaatacccggatcgttctcattaagatccagcaacagcggcgaacagtccgccatcatcggaataaactgttcatagccgacccatgctgagtcaaacaggatgtagtcacacagatgaccaattttatccaccacttggcgggcgttataaatcgtaccgtcgtaggtgcctaactgaatcacagcgaggcggaaaggacgagcctcttttgcccgctgcggtgcgacttccgcgatcagctcacgcaggtaactttcttcaaaacagtgcgcatcaatgccaccgataaagccatacgggttacgtgccgtttccagataaaccggtgttgcaccagcctgtagcaacgctccgtggtggttagatttgtggttattgcgatcaaacagcaccagatcacccggtgttagcagggcgtttaaaaccactttgttagaagatgaagtgccatttaaaacgaagtaggttttatcggcattaaacacttttgccgcatgttgctgtgcaatgcatggcgcgccttcgtgaatcagcagatcgcccatcgctacgtcggcgttgcacaagtcggcacggaacagcgcctcaccaaagtattccacaaactgattccccgccggatggcgacggaaaaattcgccgccctgatgaccagggcaatcaaacgcgctgttaccttgattgacataatcgaccagtgcgcggaagaaaggtgggcgcagttgagtttcataatggctggcagcggtttctaactggcgaccataaaattctcgtcgcgattcgcaattctcaaagacacccgaaatacggggcaaatactctgcgggtacacgttcttgattttcagtagcaataaataccgggatgccataacccgtggcatcgatttcatcgagttttccgcatgtaacatcgttgagcgataaaactattgccgccacatcgatattacgactttcattaatgtagatacattctcgctgcgtggtaaaacagtccgggcaagaatcactaaccgcaatttttaattttgacatttttcatctctttattttaggtaatagcaggtcctcaatttctcgaatgagaaatcgatcgtgccggaaaaaagcaaagttaccccgctgataaataaatcaggtagattgcttttttcagaatgcagaaacccttaccagtcaggtggctgataatacaagggttaacagagaatgagcactgcggaatacaggcatatgcctgtaatacagagagtcaggaagacctgtacgctgaagtgcccttagtcggtagactaacgggcattgaagaagtgaaagtcgaagctattgcgatgagcaaacttcataatatgagttgtccgccttatatggggcatagtgcggctgttattttccatttaatttacctttcctgatgtgaatgaaggtgaagatattctatccaggaaatacggttgaactgtgaaggtgatcaataaaaaatgatcaatcttaatttatttaatgatgagctttttactcagtaatataaaatattgaattgttatttttgtgtgttgtttaagataaaaagccgtatttattattacggctttaattaataaaaggcaggctgtattaaaattaatattcaaagcataaaccgatagccaataccggtttcagtaatgaaatggcgtgggcgggcgggatcctgttccagtttttgtcgcagatgtcccatataaatacgcaaatagtgactgtgttcgaccgcgtttggcccccacacctggttaaggagctggcgctgggtgagtacttttccggcattgttgagcagcaccgccagcaggcggaactcaattggtgtgagatgcacctcttcctcaccccggtgaatcacgcgggcggctaaatcgacggtaacatcggaaaattttaccagcggatcgggcgcggtggtggcagattggcggcgtaatgcgacgcgcagacgggcctgcaattcgccaatgccaaacggcttactcagataatcatccgctccggcatccagcgcggcgattttgtcgctctcttcgctgcgtgcggaaagcacaatcaccggcaccgcgctccactggcgcaggtcgcggataaactcaatcccatcaccatcgggcaggccgagatcgagaataatcaaatctggcttacgggttgccgcttccagcaagccgcgttgcagcgtttcggcctcaaagacgcgcatcccgtcgccctccagcgccgtgcgcagaaagcgacgaatagcctgttcatcttcaacaatcagaacgtttgtcacatatcctcatgaaattcttcaagttcaggggcagtttgctggggaagtgtaacacgaaaacaggcaccaccttccggtcggttgaacgcggtaatagtgcccccgtgtacatccactatcgcccgacaaattgccagtccaagccctacccccggtactgccgactctttattcccgcgagcaaacttatcaaatatcgtctgctcctggcctggcggaagaccggggccgttatcccagacatccagttgtagattttcgccctcaacgtgggcatcgataccaatttcggcctgcgcacccgcatatttcaccgcgttctccagcagattaatcagcacccgttcaaagagtggcccgtcaacgtggattaaggtcagcggttctggcagagaaagattgatgggcgacgataaacccggttccagcatttgcagcgcgctgccgactacttcttccagcgttaaccactctttcttcaaattaaagccgccggactgaattcgcgccatatccagtagattattcaccagtcgggtagtgttcagcacatgctgacggatctcgctggcctggcgggcgtggggtgatccttcgcttgccagatcgagcgttaagatttctgcctgaccaaacagcaccgtaagcggcgtgcgtaaatcatgcgaaagcgccgccagcagggcgttgcggatctgttcacgttcgcttgccatccgcgcctgttcttcgctggcggttagcgtcagccgctcaagggcattggcgactaacagcgtaaacgtctccagcaggcgctgctgttccgggatcatcaactggcgcagattccccggctccaccaccaccagcccgtaggttttctcgccgctttttagcggcaaaatctggtacggtacaccgggtaacgtgtcggtgcccgcgcccgcaggcaggcctttatcaaaactccactgcgcgatggcatcgtcccacggcgtcattccttgcggatgtgttaacggctgcaatttaccgttgtcatcgggcaacaacacctgactgcgggcatgaaacgtggaggcaataaattgttcgctggtggcagcgatatcctgcggactgcggcccaccgccagagctttcgacatttcatataagtgccgtgtgcgttgctcgcggtaacgggctacccgcgcctgataacgcacgccagcagtaaggttcccgatcaccagcccgacggttaacatcaccgcgaaggtcagcagatattgcacatcagagacggcgagcgtgccgcgtggggcgataaaaaagagatcgaaactcactacattaatgacggtggcaaccactgaaggccagcgtccataaaatagcgccaccaccaccacgccaagcagatacagcatcaccaggttggcggcatcaaacgccatcagccactgcatggcaattaaggtgataacggcgcataacgcggcggcaaccacgcatccctgaatttgtacacgccacttgtctttaaaagagcggttatccggcgcgttgttaatcgtgcgggcgggtggttcatcaagcgcgaccagcacctgatcgagatcgggggcgatgcgcgccagtcggtcagcaaacgtttcccgacgccaccagcggcgcgaggccgggcgaccgagaataatcttgccgagattatgttcacgggcataacgcactaccgctttctcttccgctggatcagaaagtgttgccgtctccgcgcccagttcctgcgccagacgtaaggcgctgagaattgcccgacgttttttttccggtaagcggtgcagggcaggggtttcaacatacaccgcgtgccagacgctacccagccgtgacgccagccgcgccgctgcgcggaccagtttttcgctgccggtgttatggccgatgcataaaaggatcgcgtcgcgcgtgtgccacactttctcttcgccaggatgcccccgccaggcgcgcatttgctcatcaacgcgatcggcagtacggcgcagtgccagttcgcgcagggcgatcagattacctttgcggaaaaaatgttcaatggcgcgctccgcctgcccggcaatatagactttgccttctttcagccgctggcgcagatcgtccgggggcaagtccaccagcaccacgtcgtcggcggcatcgaaaaaaggatcgggcacggtttcccgtacctgaattccggtgacgccgctgaccacatcattcagactttccagatgctgaacgttgacggtagtgaaaacatcaatgccagcttccagcagttcttcgatatcctgccagcgtttgggatgacgggaacctggcgcattactgtgcgccagttcgtccattaagatcagcgccgggcggcgggcgagggcggcatcgagatcaaactcgctgatatgccgcccacggtacgcctggcgttttaacggcagaacagccagcccttccagcatggcggcggtatcttttcgcccgtgggtttctaccacgccaaccacaatatccagcccttgcgcccgcagtcgctgggcttctgccagcatcgcccaggtcttcccgacgcctgcacaggcaccgaagaaaactttcagcttcccccgatgcggcgcggcagtttgttccagcagacgatcggggtcgggacgtaagggttcgttattcatcaagtttatccagcgccagattgagttcaacaatgttgacaaccggctggccgatatatttcaccagcggttgttggctgtattttgcgatcagttgcgtgagctgttcaacgctgagattacgcgctttcgccacgcgtgggatttgccaggccgccgcttgcggggtgatattattgtccagcccgcttgccgatgccgtcaccagttcaaccggaacgctcgcgctggcatccgggttagcggcccgtaatgcagcaacgcgtgcggctattagtttatccagctcagggttactgaccgccagattgctcccgccagaagcctgtggattatagggcatttctgccgttgccgacgggcgaccatgaaaatagccgttgccggtaaaattctgcccgattaatgccgaaccgcgcaccgtatcaccttcacgaatcaacgaaccattggcctgccagggaaaccaccattgccccagtacggtggtcagcagcgggtaaacgccgccagtaatcaataacagaaagataaatgttgataatgccggacgtaatccactcatggtaaacctcacaccagaccgcaaacggtcagcagtaaatcaatgactttgataccgataaacggcaccagcagcccacccagaccgtaaatccataagttacggcgcaacatggcagaagcggtaagcggtttataactcacgccttttaacgccaggggaatcaaaaagacgataatcaaggcgttgaaaatcaccgcactgaggattgcggagtcgggcgaatgcaggcacatgatgttcagcgcatttaactgcggatacgttgccgcgaatgccgccggaataatggcgaagtatttcgccacatcgttggcaatgctgaaggtggtcagcgagccacgggtcatcagcatctgtttgccaatgtgcaccacctcgatcaacttggtcgggttagagtcgagatcgaccatattgcccgcctctttcgccgcctgggtgccggagttcatcgccaccgcgacatctgcctgcgccagcgccggagcatcgttggtgccgtcgccggtcatcgctaccaaacgaccttccgcctgatactgacggatcaatgccagcttggcctccggtgtcgcttcggcgagaaaatcatcgacacccgcttccgcagcaatcgcggcggcagtcagacggttatcgccggtaatcatcaccgttttaatgcccattttgcgcagctgggcgaagcgctctttaataccgcctttgacgatatctttcagcgcaataacgcccagcacacgagaaccttccaccaccaccagcggcgtggctccctgacgcgcaacctgatcgactttttgatcaacatcggtagggaagtgaccaccgttagcctcaacatggcgacgaatggcatcgacagaacctttacggatcatgcggttgtcgatgttgatcccgctcatccggctttgcgcagtaaacggtacaaaggtggcatggagcgactgcacatcgcgctcgcgcaggttaaaacgctgcttggcgaggatcacaatactgcggccttccggcgtttcatcagccagcgaagccagttgtgcggcgtcagccagcgttttttcatccacgccctgcgcggggataaactccgacgcctgacggttaccgagtgtgatggtgccggttttatccagtagcagaacgtcaacgtcacctgccgcttcaactgcacgtccgctggtggcaatcacattcgcgcctagcatccggctcatcccggcgacgccgatcgctgacaacaggccgccaatagtggttgggatcagacagaccagcagcgccaccagtaccgttacgctgactgcattaccgccccacgcggaaaacggccacagtgtggcggttgccagtaaaaagacgatagtcagggcaatcagcagaatggtcagggcaatttcgttcggcgttttgcgtcgctgtgcgccttccaccatcgcgatcatccgatccagaaatgtctcgccggggttaacgctacactcaatcaccagccagtcagaaagaatacgcgtgccgccggtgacggaggcaaaatcgccgccggattcacggatcaccggtgccgattccccggtgatggcgctttcatcgaccgatgcacccccttcaataacttcaccatcgcaggggataatatcgccagcttctaccagtacgatatcgcctttacgaagttggtcggcaggaactttgtccgccgcagcgccatatttcggctcacgcagcttgcgggcaaaggcagtttttttcacccctttcagactgttggcctgcgctttactgcggccttctgccagcgcctcggcgaaattagcgaacagtacggtgatccacagccaaccgctaatggccgcgctaaacagcgcattgccgggcatcgcaccgcttgccatcgcgatgctaatacaggtggtcagcagactgccgatccagacgataaacatcaccggattgcgccattgcgcctgcgggtttaattttttcaccgcttctttcagcgcctgaacgacaagtgttggttcgaatagcgccagttgtttacgactcatattcagtgctcactcaatatcatcaggagagatattccgccaccggaccaagcgccagggcagggataaaggtcagtgcgccaaccagcaacacggtgccgattaacaggccaacaaacagcgggccgtgcgttggcagcgtgccggagctggcgggttggctctttttactcaccagcgaaccggcaattgccatcaccgggataatcaccccgaagcgaccgacaaacatgcagaacgccagtaaacagttccagaacggagagttggcgcttaatccggcaaaggcgctgccgttgttgttagcggcggatgacacggcgtacagcacttcgctaaaaccatgcgggccagggttgagcatggcgctacgtccggcgtcggtcatcatcgccaacgccgcgcccatcagcaccagcgtcggggtaaccagaattgccagtgcagtcagtttcatctcgcgtacgtcgatttttttacccagatattccggtgtacgaccaatcatcagcccggcaataaacaccgccagcaggacaaacagcatcatgccgtaaagaccagaaccgacaccgccgaacaccacttcaccaatttgcatcagccacatcggcaccatgccaccgagagcggtaaacgaatcatgcatcgcaatcaccgcgccacaggaagccgccgtcgtcacgaccgcaaacaggctactgaccagcacgccgaaacggctctctttaccttccatattgatgctgctgtccgtgcccagtgccagcagatgaggattaccctgaacttctgcccacatcaccacgcctacgcagatgacaaaaatcactgacatcgcccacagcaacatgcgcccctggcggcgatcgcccgtcacttcaccaaaggcaaagcacagcgccgttgggatcaagaagatcgccagcatctgcacgaagttggtcagtgcggttgggttttcaaacggatgcgacgagttggcattaaagaagccaccgccgttagtaccgagcatcttgatcgcttcctgagaagctacaggccccatgggtaacagctgttgcgctccttcaacggtattcacagcctgataaggcagaaagttttgcagcgcaccttgttgaataaaaaacagtgcaatcaacaacgccacagggactagcacccataacgtgatgcgtagcagatcgacccaggcattcccgagcgtgctcatgctctggcgggtaaacgcacggatgagggcaaaaatcaccgcaatcccgctggcggcagaaagaaagttttgcaccgttaagcccgccatctggctgaaatagctcaacgtggtttcaccgctataagattgccagttggtattggtgacaaagctgacggcggtattcagcgccagatcccacgacagccctggcaactgctgtggattaagcggcagatagtgctgaccgagcaacataaaaaacagcaccgccagccccagcatgttcaggccgagaatggcacaaagatattgcttccagttcatctcacggtcagagacgccaagtgcgcgaaaaagtacgcgctcaacgcccgttgtaccgggaagaggaatgtcattaatcagccgcgccagcccgctgcctaaaggacgcgccagcaccattaacaccagtaaaaacgtggcgatcagtaagaacccttgcgcagccatcagaacgcctccgcattgatcagggcataaaccagataacccagtaataaaaacaccagcaatacgccggttatcacgcctgcactcacagtgcacctccagtggcctaaaagtgataccggaagggtagaattctggctgcaaagatttcgcaaaaatctgcgggcggggtgtaaaaaaagtataaaaatggcaaaagccatgatttaactaatgtttagtattaatttaacttttgtgtaacttaagtacaggatgaatgtaaataaaccatcaataagcaaaaataagtggtcggatgagtagtaaaattacacaaaaggcggtactattttcatcagataaacaaattcatttttccggtgccattcaccgggtagatacaaaagggggagaaaagtatggaactctacagagaatatcctgcatggcttatctttttacgccgtacttatgcggttgcagcgggcgttctggcgctgcctttcatgcttttctggaaagaccgcgcccgcttttacagctacctgcatcgcgtctggtcgaaaaccagcgataaaccggtgtggatggatcaggccgaaaaggcaactggtgatttttattgattgctgagttttgaatacattgaaaaccgccagcggaaacgctggcggttttttgtatcaggaagatgttcagaggaatatttagacatcgttataccaatcgaaacatatattcatgaaatatatataaatattttcctaattgttcttatctgacagatatctcacttaaggctttcttataaatctgtagggtttcgcctgtcagcagacaaataacccgataaaacaaggatgagcagatgagcggaaaaccggcggcgcgtcagggcgacatgacgcagtatggctgtagcattgtccagggttcagccggggtacgcatcggtgcccccaccggcgtggcctgttcggtgtgccccggcggggtgacgtccggccatccggtcaatccgctgctcggtgcaaaggtccttcccggtgaaaccgacatcgccctgcccggcccgctgccgttcattctctcccgcacctacagcagttaccggacaaaaacgcccgcgccggtggggagcctcggccccggctggaaaatgcctgcggatatccgcttacagctgcgcgataacacactgatactcagtgataacggcggcagaagcctgtattttgagcacctgtttcccggtgaggacggttacagccgcagcgagtcactgtggctggtgcgcggcggcgtcctgagactggatgaaggtcaccggctggccgcactctggcaggcgctgccggaagaactccgcttaagtccgcatcgttatctggcacaaacagtccgcaggggccgtggtggctgctcggctggtgtgagcgggtgccggaagcggatgaggtgctgcctgcgccgctgccgccgtaccgggtactgaccgggctggtggaccgcttcgggcgcacacagacgttccaccgcgaagccgccggtgaattcagcggcgaaatcaccggcgtgacggatggtgccgggcgtcacttccggctggtactgaccacgcaggcgcagcgggcagaagaagcccggcagcaggccatttccggcgggacggaaccgtccgcttttcctgataccctgccgggttacaccgaatatggccgggacaacggcatccgtctgtctgccgtgtggctgacgcacgacccggaatacccggagaatttacctgccgcgccgctggtgcgctatggctggacgccccgcggcgaactggcggcggtgtatgaccgcagcaatacacaggtgcgcagctttacttacgatgataaataccggggccggatggtggcgcaccgtcacacgggccgaccggaaatctgttaccgttacgacagcgacgggcgggtgacagaacagctaaacccggcaggcttaagttacacgtatcagtatgagaaggaccgcatcaccatcaccgacagcctgaaccgccgtgaagtcctgcacacgcagggtgaaggcgggctgaagcgggtggtgaaaaaggaacacgcggacggcagcgtcacgcagagtcagtttgacgcggtgggcaggctcagggcacagacggatgccgcaggcaggacaacagaatacagtccggatgtggtgacgggcctcatcacgcgcatcaccacgccggatggcagggcatcggcgttttactataaccaccacagccagttaacgtcagccaccgggcctgacgggctggaaatacgccgggaatatgatgaatggggccgtctgattcaggaaactgcccctgacggcgatatcacccgctaccgttatgataatccacacagtgacttaccctgcgcaacggaagatgccaccggcagccggaaaaccatgacgtggagccgttacggtcagttgctgagcttcactgactgttccggttatgtaacccgctatgaccatgaccgttttggtcaggtgacggcggtgcaccgcgaggaagggctgagtcagtaccgcgcatacgacagccgtggacagttaattgccgtgaaagacacgcagggccatgaaacgcggtatgaatacaacgccgccggtgacctgaccaccgtcattgccccggacggcagcagaaacgggacacagtacgatgcgtggggaaaagccatctgtaccacgcagggcggtctgacgcgcagtatggaatacgatgctgccggacgggtcatccgcctgaccagtgaaaacggcagccacaccaccttccgttacgatgtactcgaccggctgatacaggaaaccggctttgacggccgcacacagcgttatcaccacgacctgaccggcaaacttatccgcagcgaggatgaggggctggtcacccactggcactatgacgaagcagaccgcctcacgcaccgcaccgtgaatggcgaaaccgcagagcggtggcagtatgacgaacgcggctggctgacagacatcagccatatcagcgaagggcaccgggtgacggtgcactatggttatgacagtaaaggccgcctcgccagtgaacacctgacggtgcatcatccgcagacgaatgaactgctctggcagcatgagaccagacatgcgtacaacgcacagggactggcgaaccgctgtataccggacagcctgcccgccgtggaatggctgacctacggcagcggctggctgtcaggcatgaaactcggcgacacaccgctggtggagtacacccgcgaccgcctgcaccgggaaacgctgcgcagcttcggccgttatgaactcaccaccgcttatacccctgccgggcagttacagagccagcacctgaacagcctgctgtctgaccgcgattacacctggaacgacaacggcgaactcatccgcatcagcagcccgcgccagacccggagttacagctacagcaccaccggcaggctgaccggcgttcacaccaccgcagcgaatctggatatccgcatcccgtataccacagacccggcaggtaaccgcctgcccgacccggagctgcacccggacagcgccctcagcatgtggccggataaccgtatcgcccgtgacgcgcactatctttaccggtatgaccgtcacggcaggctgacagagaaaaccgacctcatcccggaaggggttatccgcacggatgatgagcgcacccaccggtaccattacgacagtcagcaccggctggtgcactacacgcggacacaatatgcagagccgctggtcgaaagtcgctatctttacgacccgctgggccgcagggtggcaaaacgggtatggcggcgtgaacgggacctgacgggctggatgtcgctgtcacggaaaccgcaagtgacctggtacggctgggacggcgaccgcctgaccacgatacagaacgacagaacccgcatccagacgatttatcagccggggagcttcacgccactcatcagggttgaaaccgccaccggtgagctggcgaaaacgcagcgccgcagcctggcggatacccttcagcagtccggtggcgaagacggtggcagtgtggtgttcccgccggtgctggtgcagatgctcgaccggctggaaagtgaaatcctggctgaccgggtgagtgaggaaagccgccgctggctggcatcgtgcggcctgacggtggcgcagatgcaaagccagatggacccggtatacacgccggcgcgaaaaattcacctgtaccactgcgaccatcgcggcctgccgctggcccttatcagcacggaagggacaacagcgtggtacgcagaatacgatgaatggggtaacctgctgaatgaagagaacccgcatcagctgcagcagcttatccgcctgccggggcagcagtatgatgaggagtccggcctgtattacaaccgccaccgctattatgacccgctgcaggggcgatatatcactcaggatccgattgggctgaaagggggatggaatttttatcagtatccgttgaatccgatctcaaatatagatccattaggattagaaacactaaaatgcattaagccactgcattcaatgggcggaactggtgaaagaagcggtccagatatatgggggaatccgttctatcatcaatatctttgtgtcccagatggtaaaggggactatacttgtggtggccaagaccaacggggagaatcaaaaggagatggtctatgggggccaggtaaagcaagtaatgatacaaaagaagctgctggccgttgtgacctcgttgaaaccgataatagttgtgtggagaactgtttaaaagggaagtttaaagaggtaaggccgcgttattctgtattgcctgatatattcacacctataaatttagggctatttaaaaactgccaagactggtctaatgattctttagaaacatgtaagatgaagtgctccggaaataacattggacgttttattagatttgtattcaccggagtgatgtaatgaaatatattatttttttattcagagctatatggctggctttatcgcttttaatactattcttttccatgcatagactttcactattagactccactcgtgatgtgagcgagttaattagtctcatgtcttatggaatgatggtaatatgttttccaacaggcatagtattctttattgctctaatatttatagggactgtatcagacattattggcgtaaggattgatagtaagtatattatggcgataataatatggctttattttctgtcaggagggtatattcaatggtttgtattaagtaagcgcattataaacaaataaattaagttaattgctcttattattatatgtaacctgggcattgatatcccgtatgccacagacccggcaggtaaccgcctgcccgacccggagctgcacccggacagcaccctcagcatgtggccggataaccgtatcgcccgtgacgcgcactatctttaccggtatgaccgtcacggcaggctgacggagaaaaccgacctcatcccggaaggggttatccgcacggatgatgagcgcacccaccggtaccattacgacagtcagcaccggctggtgcactacacgcggacacaatatgcagagccgctggtcgaaagccgctatctttacgacccgctgggccgcagggtggcaaaacgggtgtggcgacgtgaacgggacctgacgggctggatgtcgctgtcacggaaaccgcaagtgacctggtacggctgggacggcgaccgcctgaccacgatacagaacgacagaacccgcatccagacgatttatcagccggggagcttcacgccactcatcagggttgaaaccgccaccggtgagctggcgaaaacgcagcgccgcagcctggcggatacccttcagcagtccggcggcgaagacggtggcagtgtggtgttcccgccggtgctggtgcagatgctcgaccggctggaaagtgaaatcctggctgaccgggtgagtgaggaaagccgccgctggctggcatcgtgcggcctgacggtggagcagatgcaaaaccagatggacccggtgtacacgccggcgcgaaaaatccacctgtaccactgcgaccatcgcggcctgccgctggcgcttgtcagcacggaaggggcaacagaatggtgcgcagaatacgatgaatggggcaacctgctgaatgaagagaacccgcatcagctgcagcagcttatccggctgccggggcagcagtatgatgaggagtccggcctgtattacaaccgccaccgctattatgacccgctgcaggggaggtatatcactcaggatccgattgggctgaaggggggatggaatttttatcagtatccgctgaatccggttcagtatatagattcaatgggactggcatcaaaatatggacacttaaataatggcggatatggagcgagacccaacaaaccgcctacgcccgatccaagtaaattgccggacatagcgaaacaattaagactgccatatcctattgaccaggccagtagtgcgcctaatgttttcaaaacattcttcagagcattaagcccttacgactacacactgtattgcaggaagtgggtaaaaccaaatctgacttgtacgccacaggatgattcccagtatccagggatggatacaaagacagcaagtgattacctgccacagacaaattggccaacaactcaattaccaccaggatatacttgtgcagaaccctatttattcccagacattaataaacccgatgggccagcaacagcagggatagatgatttgggtgaaattttagctaagatgaaacagagaacatcgagaggaataagaaaatgaaaagagttttgttctttttgctgatgatatttgttagttttggtgttatagctgattgcgaaatacaagctaaagatcatgattgttttactattttcgctaagggtactattttttccgcgtttcctgtcttaaataataaagccatgtggagatggtatcagaatgaggacatcggtgagtattattggcaaacagaactgggtacatgtaaaaataataaattcacaccaagcggggcgagactcttaattcgcgtcgggtcactacgccttaatgaaaatcatgccatcaaaggaacgttgcaggagttgataaatacagcagaaaaaacggcgtttctcggcgatcggtttagaagttatataagagcgggtatctatcaaaaaaagagcagtgatccagctcagttgttggcagtccttgataattcaatcatggttaaatattttaaagaagagaagccaacttatgctcgaatgacagcacatctcccgaacaaagatgagtcttacgaatgtttaacaaaaatacagcatgaactgcttcgtagtgaagaaaaataaaacatcttcctgagaaaataaattaaccattcggaaaaacatgttcttaatggatatccaggtacaccagaaggtcgatttggaaaaatggattccgatggtaagaatatcatatattctgaatgtaatgttttaccctcaacttttgagattcgataggtatagaacacgagaaactcactaatattacttattatgatattgtttacaatatcacactcagtatttggaaaagaaaatccagtggaaattttagtaaatagtcgtgaaatggctttggaattatcatatgtttacattaaatatgtatacgggaaagaaaaagcagaatttcagaaaccatatagtattacagatgacaataattgttggaaaatcgagggaaaacaaccgaagacgttaggaggaaattttacaatactaatagcgaaaaaagatgggcaagtgttgcatgtaatacacacaaaataatccattgtacagtcgattcaaatattttaccaaggtgtgtttcgtaactattttgtgtacaatatgactctacatatcgacgaaaaaaccacttgatttgacaggaacacattcaaaaaatttcttttttcatttcaggagcgattttcatctgttacttgaagtatctgtgagattaagtgactccccctaacgtcgtactaaatagtaattactggccataccgggagcagtattcggcgcttcccacatgcagctgaataaccgcatcagcgaagatgtattgtatttttactatcacaatgtgtacggacggtttatggaaaagaatgaacattagatacgcgatgcggcggcaggttacacggttatcactacgatagccaatactggctggtgcattaccatcgtgaacaataggacgccgtactgctggaaatttcttacctttatgactccccgcgccgccgtatcggaaaacgggaagcaatcaagatgaggctgatataatgtgcgggatgcctgagtatttttagaataggggggtaatatgtttgatagaatatatcttggtgatcgagcaataaaaaaaattgaatttgatttatggagtaaacaaattagaattcaggttaatttaatctcaaggatagcctatggtacaacagaatggattttttatgataatgaagacttagaagatggttatttggtatttttagatgttagtttcttcaatataactcctaatggctctattccagatgattatataatttcaataattacagataatgtcaatgttgaatattttgaatcaactatagttgcagttggacaaattccaaatacaaattctggagacattgataatattggtgagtgtcaaattttcatcaggtataaacacagctggattgagaataaattcaaagaaaaaataattgaataaccatgttatgtatagacattttagatggaacgaaccagaggaaggcatgcctccgacttgggttatatgggcacggatttttagtgtagtgaactcaacgacgcaaaccgaataacctgccgctagtgcttatcagcacggaaggggcaatagaatggtgcgcagaatacgatgagtggggcaacctgccagggaaagatcatcagaagttcactttttgtaccagggaaagatcatcagaagttcactttttgtactatataattcgcattttatgtttaaaaattgagatattccttattacctgaagctgttttttattgcttatacatgatcaaatacttcttacataattaaggagaacaaaatggaacttaaaaaattgatggaacatatttctattatccccgattacagacaagcctggaaagtggaacataaattatcggatattctactgttgactatttgtgccgttatttctggtgcagaaggctgggaagatatagaggattttgggaaacacatcccgattttttgaagcaatatggtgattttgagaatggtattcctgttcacgataccattgccagagttgtatcctgtatctgtcctgcgaaatttcatgagagctttattaactggatgcttgactaccattcttcagatgataaagacgtcatcgcaattgatggaaaaatacaccggcattcttatgacaagagtcgccgtaagggagcgattcatgtcattagtgcgttctcaacaatgcacagtctggtcatcggacagatcaagacggataagaaatccaatgagatcacagctatccctgaacttcttaacatgctggatattaaaggaaaaatcatcaaaaccgatgcgatgggttgccagaaagatattgcagagaagatacaaaaacagggaggtgattatttattcgctgtaaaaggaaaccaggggcggctaaataaagccttcgaggaaaaatttccgctgaaagaattaaataatcccaagcatgacagttacgcaattagtgaaaagagtcacggcagagaagaaacccgtcttcatattgtttgcgatgtccctgatgagcttattgatttcacgtttgaatagaaagggcagctatggttagaaactacctgacgtcagtccttgcggggagcaggctttcgtaaatttgtcctgctacaacaggattaacttcacaaatatcatttctcaacgtctacacttactcctgtaaaccgctcaggagcagtaatgaatctacaacgatttgatgacagcaccctaatccgtatctttgcccttcatgagttacatcgactgaaagaacatggcttaacgcgcggggcgcttctcgattatcacagccgctataaactcgtctttctggcgcattctcagccggagtaccgcaaacttggcccgttcgtggctgatattcaccagtggcaaaatctggatgactattacaaccagtaccgccaacgcgtagttgttttgctttctcaccccgccaacccgcgcgatcacaccaatgttttgatgcacgttcagggttattttcgcccgcatattgattccacagaacgccagcagctggctgcgcttatcgacagttatcgccgtggcgagcaaccacttcttgcgccgctgatgcgtatcaaacactatatggcgctttatcctgacgcctggctttcagggcagcgttatttcgaactttggccgcgtgtgattaacttgcgccattcaggagttttatgactacccatctggtctggtttcgccaggatttacgtctgcacgataatctcgcactggctgccgcctgccgcaattcgtctgcacgcgtgctggcgttgtatatcgctacaccacgccagtgggcgacgcataacatgtcgccgcgtcaggctgaacttatcaatgctcaactgaatgggctacaaatagcgcttgcggaaaaaggtattcctttattgttccgtgaagtggatgactttgtcgccagtgttgaaatagttaaacaggtgtgcgcggaaaacagcgttacccacctgttttataactatcagtatgaagtgaatgagcgggcgcgggatgtggaagttgaaagagcgctgcgtaacgtggtgtgtgaaggatttgatgacagcgtgatcctgccgcctggcgcggtgatgaccggtaatcacgagatgtacaaagtctttacgccttttaagaatgcctggctgaaacggctgcgggaagggatgccggagtgcgtcgctgcgccaaaagttcgtagtagcggatcgatagagccctcgccatccattacgctgaattatcctcgtcagtctttcgatactgcgcattttccggtggaagaaaaagcggcgattgcgcaattacgccagttttgccagaacggtgccggagaatatgagcaacaacgagattttccggcagtggaaggcaccagccgtttgtcggccagcctggcaacgggcgggttatcgcctcgccagtgcttgcatcgcttgttggctgaacagccgcaggcgctggacggtggggccggtagtgtctggcttaatgagctgatctggcgcgagttttaccgtcacctgataacgtatcacccctcgttgtgtaaacatcgtccatttattgcctggacggatcgtgtacagtggcagagcaatcccgcacatttacaggcctggcaggaaggcaaaacgggatacccgattgttgatgccgctatgcgtcagcttaacagcactggctggatgcataacaggctacggatgattacagccagttttctggtgaaagatttattgatcgactggcgcgaaggcgagcgatatttcatgtcgcagctgattgatggtgatttggcagccaataacggtggctggcagtgggccgcttcaaccggaaccgatgcagcgccgtattttcgtattttcaacccgacaacccagggcgagaaatttgatcatgagggcgagtttatccgccagtggctaccggaactgcgcgatgtgccagggaaagtggtgcatgagccgtggaagtgggcgcagaaagcaggtgtgacgctggattatccgcaaccgatagtcgagcacaaagaagcgagagtacaaacgttggcagcgtatgaggcggcgcggaaggggaaataacagacgcgtcaggcaatcgagcccagatgccggatgcggcgtgaacgccttatccagcctacaaatttgtgcaaattcaataaattgcaggaaatacgtaggcctgataagacgcgtcaagcgtcgcatcaggcatcggtgctggcctattaagactccagcgccagcgcgcggtttctgaatttcagcgcctgatacagccaaatcatcagtaccagtcctacacacgccagtgcgccccaggtaatttgatcaaatacttcaatatatgcattgatggagtagttgatcgccccggaagcatcaaacgaagcctgcgatgtctgatcggcaatcacgcccgccagatagttcgcgatcgcgccagaaagcagcatgtagatgccggttaatacgccggtcacaccggggatttcaatgcgcgtaatttgcgacatggcaaccgggtcgataaacagttccgcaaagcccatcaccgccaggcctaataccatcagtggcagagaagagtgaccatacattgcggaccagcgggcgcttaaggtcagaatgcagaatccggcgctcatcaggccaaggccaagagcaaatttcccccagatgcgcacggtacgattacccgcgacactctcttttaccacccacgccaggaacacaccgcacagcataactgcgaaggcattaatcgactggaacatcgcggtcggaacggtataaccaaacatatcgcggttaacgaagcggtcgatataaaggctaatcgagctaccgccctgttgtgcgaaggcccagaacaacatactgaagaaggtgagcgtcacaatcagccccagctccttccgctgtttctggttttctgctttgcgataaatttttgccagtacacccaggccaataatagtcgcgacaattaaggcgtataccgaccactctttccagaacagtatggtaatcagtgcaggcgttgccaccagcagaaccagcagccatccccagttcggcaggagaaagtttgtcgcacgcagtacttttttgttaacgccgcgggtatgagtgaaatgacgattgccacataagaaaatgaccagacccgcgatcatgccaaccgccgccaggccaaagcccatcgcccagctgtactcttcctgggcgtaaccacaggcgataggtgcgataatagaccccacgttacccgccgcatacatcagcgagaaaccgccatcacgacgcggatcggttggctcatacagctcgccgagcagacagcttacgttagatttaaacaggccatagccgcagacgataatcgccagggacagatagaggaatgacggatggatctcactggcacccagcaccacatgaccgatcgccatcaacaacgcccccagcatcaccgccatgcgattgccgagaactttatccgccaaaaagccaccgaggattggcgtgacatacaccagcgaacagtaggcgctaaataactcgtaggcgtgagtatcgttgtattttagttgattggtgagatagagaatcagcagggcacgcatgccgtaaaagctaaaatattcccagatttgcagcgcaacgacatagtaaatagcgcgcggctgtgatgcgtgtttattcataataattccacaattgacggcaacgtcacgtaatagttgcgcggcgtgcttgtgtttccttaaagttaaaactttgatacagatctgattatttatgcaatatgctgtctgattgcataaatatacattagctgaagcgtgatgatataaacaatttgcgtcttttggcgtcgggtttgtttcttaatatgtcaaaagattggctatcgacgaactggcgaggtaacgctatgttaacggtgtagctatcagaatacggaaggcgcgaagatgaaaaacaccgaactggaacaactgattaacgaaaaactgaacagcgcggcgattagtgattacgcgccgaatggtttgcaggtggaaggcaaagagacggtgcaaaaaattgttaccggtgtcaccgccagccaggctttgctcgatgaggcagtgcgtctgggcgcggatgcggtcattgtgcatcatggctacttctggaaaggagagtctccggtcattcgcggaatgaagcgtaaccgtttaaaaacgttgctggcgaatgatatcaacctgtatggctggcatttgccgcttgacgcacatcctgagctgggcaataacgcacagctggcggcgttactggggatcacggtcatgggcgaaattgagccgttggtgccgtggggcgaactgaccatgcctgtgccgggactggagctggcttcctggattgaagcgcgtctgggacgtaagccgttatggtgtggcgataccggacctgaggtggtccagcgcgtcgcctggtgcacgggcggcgggcaaagttttatcgatagcgccgcgcgttttggcgtggatgcttttattactggcgaagtttctgaacagaccattcattcagcccgcgagcagggattgcatttttatgctgcaggtcaccatgccactgaacgtggtggtattcgcgcattgagcgagtggctgaatgaaaataccgatcttgatgtgacctttattgatattcctaatcctgcataacgaataatcagagggatcgaaagtgcaacgagcgcgttgttatctgataggtgaaacggcggtagtgctggaactggaaccgccggtgacgctggctagccagaaacggatctggcgactggcgcagcgtctggtggatatgccgaatgtggttgaagccattcccggcatgaacaatatcacggtgattttgcgtaatcctgagtcgctggcgctggatgccatagagcgtttgcaacgctggtgggaggagagcgaggcgctggagccggagtctcgctttattgaaattccggtggtttacggtggtgcaggcggaccggatttggcggtggtcgcggcgcattgcgggttgagcgaaaaacaggttgttgaattgcactcctccgtggaatacgtggtctggtttttaggttttcaaccgggcttcccgtatctcgggagtttgccggaacaactacacacgccacggcgcgctgaaccgcgcttactcgttccggcaggttctgtcgggatcggcgggccgcagactggtgtttatccgctggcaacgccgggtggctggcagttgattggtcatacctcactcagcctgtttgatccggcgcgtgacgaacccatcttattacgtccgggagacagcgtgcgctttgtaccgcagaaggagggagtatgctgaagattattcgtgcgggcatgtataccactgtgcaggatggcggtcgtcacggttttcgccagtcgggtatcagccactgcggcgcactggatatgcccgcgttacgcattgctaacctactggtgggtaatgacgccaatgcccccgcgctggagatcacgctcggtcagttaactgttgagttcgaaactgatgggtggtttgctctgacgggtgccggttgcgaagcgcggctggatgataatgccgtctggaccggctggcgattgccgatgaaagcaggccagcgtttaacgcttaaacgcccgcagcacgggatgcgcagttatctggcggtcgcgggtggtattgatgttccgccggtaatggggtcatgcagcaccgatctcaacgtggggattggcgggctggaaggccgtttactgaaggatggtgaccgactcccgattggcaaatcgaagcatgattttatggaagcgcagggcgttaaacagctgctgtggggcaaccgcattcgcgccttgccggggccggaatatcatgagttcgatcgcgcctcgcaggatgcattctggcgttcgccctggcagcttagcccgcaaagtaaccgcatgggctatcgcttacaggggcaaattttaaaacgcaccaccgatcgcgaactgttatctcacggtttgttaccgggcgtggtgcaggtgccacataacgggcagccgattgtgttgatgaacgacgcacagaccaccggtggttacccgcgtattgcctgcatcattgaggctgatatgtaccatcttgcgcaaattccgctcggtcagccgattcattttgtccagtgttcactggaagaggcactgaaagcgcggcaagatcagcaacgttattttgaacaattagcgtggcggctgcacaatgaaaattgacctgaacgccgatctgggcgaaggctgcgccagcgacgcagagctattaacgctggtttcctctgccaatattgcctgtggatttcatgcaggcgatgcgcaaatcatgcaggcttgcgtgcgtgaagcaataaaaaatggtgtcgcgattggcgctcacccgagttttcccgacagggaaaattttggtcgcagcgccatgcagctgccgccagaaaccgtttacgcccagacgctgtatcaaattggcgcgctggcaacgattgcccgtgcgcaaggcggcgtaatgcgtcatgtcaaaccgcacggcatgttgtacaaccaggcggcgaaagaagcacaactggcagccgccatcgccagagcggtatacgcttgcgatccagcattggttctcgtcgggctggcaggaagcgagctgattcgtgcaggcaagcaatatggcctgacaacgcgcgaggaagtgtttgccgatcgcggttatcaggctgacggctcgctggtgccgcgaagccagccaggcgcgttgattgaaaacgaagaacaggcgctggcgcaaacgctggagatggtgcaacacggcagagtcaaaagtatcaccggcgaatgggcaacggtcacggcgcaaacggtctgcctgcatggcgacggcgagcacgcactggcattcgcccgccgactacgctctacatttgccgaaaaggggattgttgtcgcagcataaccccgcttaataaagaatgaaaaaaggatatcaccatgcctgaaggcccggagatccgccgtgcagcggataacctggaggcggcgatcaaaggcaaaccactaactgatgtctggtttgccttcccgcagttaaaatcttatcaatcaccacttatcggtcaacacgttacccatgtggaaacgcgtggtaaggcgttgttaactcatttttccaacgacttaacgctctacagccataatcagctttacggcgtttggcgcgtggttgataccggcgaagagccgcagaccacgcgagtattgcgggtaaaactgcaaacggttgacaaaaccattctgctttatagcgcctcggatattgagatgttgaccccggaacaactgaccacgcatccgtttttacaacgcgttggtcccgatgtgctggatccgaatctgacgccggaggtggtaaaggaacgattattgtcgccgcgctttcgtaaccgtcagtttgcaggattactgctcgatcaggcgtttctggctgggcttggcaattatttgcgggtggagatcctctggcaggttgggttgactggaaatcataaagcgaaagatctcaatgcggcgcaactggatgcactcgcacacgcgttactggagattcctcggttttcttacgctacgcgggggcaggtggatgagaataagcatcatggggcgctgtttcgctttaaggtttttcatcgtgatggcgaactgtgcgaacgctgtggcggcatcattgagaaaaccacgttgtcctcgcgcccgttttactggtgtccaggctgccagcactaggccgaccgcttcggcgcataggttgaaataaaccgcgcaatggctggccccgtcagcaaaatactgaacaggcgcagggtttgcatcgccataataagcgccatatcggcattgctccctgcggcgatgaccgccacggtatcaagcccgccgggactggtggcgaggtaggcagtcataaaatcaatatgcataaaccgggtcagtccccacgccatacctgcacaaatagccagcagagcaaaaatcgacagcaggatttgcggtagcgggcgtagtgcccgcagtaagatttgtttatcgaaaccaagaccaatccgccagccaattgccatatacgccatcgccagcagccattccggtagttcgatggtgatgagctgaccagactggagcactgcgcccgccagcatcgggatgagcatcgtgccggaaggaagacgcagcaggcatcccactgtaccggcaacgaccgcgagcaaaatagtaagcaggagattaatgctcactggcgggaaccagacgatatgctggttaaccgcttcagcgttatcgcccagcatcatgcgggtgaccagaacagcggcccccgcgacaaacagcactcgcagatattgcataaacgccaccaggcgaatatctgcgccgtaatcttgcgccatagcgaccattgccgccgcgccgccaggagaggagccccaggcaccggtatttccaggcaatgagctatagcgcaccaataaccaacccacaatggcgctggaaagcagcgttaccagtaaaattgcaagcacgatcggccagttgacagccagggtggtgagaatcgaaccagtgaggttttgcgcaatcatgcagccaagaatggcctgggcggcgagaaaagcagagcggggaagttgcagagtaattccgcgcatactaaagatgatcccggcaatcatcggcccaagtaatagcgccgccgggagatgtaccgcgaggaaaccaatagaaaggagaagtgatagcacacataacattccccactgcaaaactggcatccttcgctccctcattattttctctttggtgtatcgatacagcataaagaaagccgggccaggaaaaaataacagcaatcaaggaaaaggggaaaatcagcaattttctgaaagagatgccctttccggctgcaaagggcatcatggcaaatcagttatagttaatcttaaaaagcaccactgtatcgaagggcccagcctcgatgggggtacctgcaatggacgaaagttcagctgtataggttttttcgtagatcaacatgtcactggtgaaatcggcgtattcagcatatttattgaaggtataaggcgaggcgttttcatccagcaaacgtagcttcagaccattaccaatcaacaatgctttatcttcttcaaccaacgtttcttcagtataaaacgaggaactgactttaaatccgtcggtgcattgatcgttttggctcttggtcgttttaatactgaacgttttcgtcatgttatgtcgccgaatatccagcaaattaaatttaccaaaatcaatcacctgtgtttccggtgaaatagaaaaattgacgctgcaatccagcacgcgaatgttttccagaccagtaatatgatatttcaggttttgggcggtaggatcttcgttaacgctaccggcaccgtcaaattgcacgacgatatagtcgctaagcgtactttgataatcatgcggcggcatttctcgtattttgacgtataaccgcatgcgagcgagaaaggtacgcgacatgtgaatattagcgggatcgcccgaacaaattttgttctgccatcccatcgcgatgatctgctcaggggtataaatgtcaatgttcttactgtcgatacactggttagtgtcgatgcggctttttccctggttggcgtcataatcaacgccattgtaagttacgccgagttgataatagcgatcctgcacccccgggtaggggtttacccaggcgtagacatgctcactttcaaagttgccgttggtattgttgtcacaatagacgggaattttaatatcgtcagattcccaaatcttatcgccgggtttggcattgcctggtacagcaaaaggttgaatcacttctgatttttctaccgaaccaccggatgaaccaaagtagcagttcagggcaagcgcagacttcaacggcagaaataacagacagatgacgagcaacactcccttgccagcactcatttcttcgcctccacggcttgtaaacggcattctccgctgcagttgagcgtcgtcatgcgtaacgcgccgtaatcatccatataaccgagataaaactggctgccgctataacttccggtgtttgtgttgaccgtactaaaaggcgcaatcatcacggttttgaagccggggaaaacgcctttttcatttctccccagataggcaatggtcagataatacgcggtaggatttttcagtgtcagttggttgccctgctggctaacctgtaactgcagttcgaccttttctcctgctttcttgcgtaatgcagccggtcgccagaacaccttgatacgactctgaatggcgacttgcagaacggcatggccgctgtttttttccggggcgggaggaatttcacgcatattgtagaaaaatagcgtttcgcgatcgcccggtaatttcgcggtcgaggcttgctttactatccgcacctgcgttgttgctttcggttccagacgttgtatcggtggcagggcaaccagaagatcatcgcttttctcccctttttcattttcgagccaggaataagcgaggtaggggagtttatcgctacgattatccacgcgcagactggtagctttatcattagcgttaaacacaatacgagtgcgatcgggttgtagtgcagcgtggctgcacagactggcaaccaacaacaaaaggggtagtcctttcataaatgtcattttcatttccttaattaatgacaaggtaaaatcaggcgatttgcggtgtcttccatatgttcaggaagatggagcgagcaatgctgactatcaccccagaccacggtaaacttttgattttcagcgactccgcttaaccaggcatgtccttcctcgccaaccatccccacgctaatgccgctgtcatcctggcggatatccgctccgaggggaggaaactgaccgctggcgttgcgaatgatgacgttaacgtctttaccggaacgggaagccagtgatttgtaacctatcgcgccttcaatccacgtttctttgataacgttttctgcaactgttacgccgtcgggtaagtcattcatgttcaccgccacggtggaaggctggtaactggaaatcaacggcaccaccgcaatgccaaaatggttggtgtagtcgagattgccctgaaccggaatatctgccacgccatcggtgctgaccatcaggcgtggttcattggtggagctgcggcgatgaaacgctgcaccatattgggttgcggtgaaagaaccgctccagctgctgctgacggaactgtaatcattggcggcataggtaccagaaatatcccactcacccgctgaactcaggtgctgatagttaccgctcacctgggctccattgtcaggacggtcggattgcagtccggcagacatgccccagctattacgttcatccagcgtatcgttccacgacatgcggtgtgtggtgctgtggctactgttttgcatgtcatagccaacccgaccaccgttaccgaaggggagcgaaatcgacaggtaaatctggttgtcgcgatctttatcttcgtaatgggttgtattgaatgacgtcgaaatagagatatctctccagtcaccaatatcaacattaaaacctgccgtgatgttggcggtcgtggaggcgtctgcattccaccaggtttgatgtagcaggttggcgtaaagattgaggtttagtggggtaatcggttggcccacagataagctgatcgtctgtttttcgtcctgcgcatcgctgtcgttgtatttgtgatccagatagttggcgtagctgtgaaaatgacgatcggagaaacgataagcggcgagggaaatcgtgctgttagtggcatccacttgtttgctgtaattaaaacggtagcttaagccccgctcgtcctgctgagtatcaaaatggctactggcccacgtgacatcaaacgacagcgcaccaagccacagcatattttgcccaatacccattgcggcagaatggtagtcatcaccagaaagcagcaggccgccgtacagcgaggtgtttgacagcatcccccaggaaacttcattgctaaaaaaggtttcattttcagtttgatgtgacatggagggccgtggctgacccgcggccagtttatagcgaacctgtccctgacgagtcaggaagggcgtcgatgctgccgaaacctggaaattgttcacccgaccatcttcttccgtcactttgacatcaagcgtgccctgaacagactgattgaggtcatcaataataaacggtcccggagggacttttttctggtaaatgacgcgacctgattgactgatcgtcaccgtggcattggtctgtgcaataccgctaatttgtggggcgtatccgcgtagctcccatggcaacattcgatcgtcactcgccagtgccgcgccagtataagaaaaaccatcgaaaatattggaactgaaatcggtttcgccgagggttaatttagagcctaattgcggtaatggacgaaaaagataggtgcgcgatattccgcctgactgttcatggctatcttcgctatcggtgttattaagctggtaatcactgcgtaagcgccatgacccggcgttaattccggtggtaccgtaggcgttcaggttagtgctgctgctgccgtcctgtgggcggtagttgctggcaaacaggttataatccatcaggaccccggcaacaccttctttccatgtagaggggggagcccagttttctgagtgccacgccagccaggcttgcggaatactaatattcagttgctgattggcttgatcgaaattgaagagcatttcaggtcgggaactgaaatcaatacaccgatctatctgtggcaaggactgacggatatctggttttaaaccaaatttatcgaccagtgaatcattgatgcatggaatggttttgtcaccctttttttgccagttgattttttgcccattactgatttggttgttattcaccgcaacgctaacaaaatattcaccgggagcaatgactcctttttcctttaataatgaaatatcaatgcggtcgcgcattgatttatcgagaacattcagattaaattcgaccgccaatgcgcaaggcatcgccatgaccaggcaggatacaaaagagagtcgataaatattcacggtgtccatacctgataaatatttgaagaaaggcggcgatagcgccgccaaagtaatacttatttataatccagcacgtaggtcgcattcgctgtaactgcgcctggcgttacaggtgtagcctgatcaatttgttccatccaggcaaagaaattcagcgtttgttcgctggaggtcggagccaggtcgatatctggagtagcggtgcctaaaacgatattgctttgatctttattcattaaacgtacgccgacgccggtggcttcacccgtgctggtgttgttgagaatcggatctgcgccggtggttttcgctgagctatcaaaggtgactgcaactttagaaatcttgccaccggaaccgttgctggagttttccagatcacagttgactaagcgcaggtcgacagcaacggcatcgctgtgatgtgactgattaatgtggctggtggtcacctgaccgagttcaacctctttatcaatatcatcctgatgtatttcacacggtgcttcaataacttcacctttaaagtgaatttcaccggatccttcatcagctgcataaacaggtgcagtgaatagcagagatatggccagagcggtcaatgttttttgtcctttaaacataactgagtcctttaaataatgagatagagtgttgcgtagcaagaatatataaaatgacaattgaatgtatttggttttatttaataatattaaaaagcttgtgatataaagaatggaataattgagtgcataaatttattgtttaatgagatgaaggatggggtgggatggatatgcataattttcattgggttaacaatgttaccggcagggaagtataaaaataaacttatcattctgctcagtatgtgacttgtctcattttttcaccttattaatgggtatttgcatctggtttaatttttacaattttttatgttcagccatataaaaaagaacccgctctattaaaggcgggtccggaaagtaaacggcttagcaatcaatcattaacgcttgatatcgcttttaaagtcgcgtttttcatatcctgtatacagctgacgcggacgggcaatcttcataccgtcactgtgcatctcgctccagtgggcgatccagccaacggtacgtgccattgcgaaaatgacggtgaacatggaagacggaatacccatcgctttcaggatgataccagagtagaaatcgacgttcgggtacagtttcttctcgataaagtacgggtcgttcagcgcgatgttttccagctccatagccacttccagcaggtcatccttcgtgcccagctctttcagcacttcatggcaggtttcacgcattacggtggcgcgcgggtcgtaatttttgtacacgcggtgaccgaagcccatcaggcggaaagaatcatttttatctttcgcacgacgaacaaattccggaatgtgtttaacggagctgatttcttccagcattttcagcgctgcttcgttagcaccaccgtgcgcaggtccccacagtgaagcaatacctgctgcgatacaggcaaacgggttcgcacccgaagagccagcggtacgcacggtggaggtggaggcgttctgttcatggtcagcgtgcaggatcaaaatacggtccatagcacgttccagaatcggattaacttcatacggttcgcacggcgtagagaacatcatattcaggaagttaccggcgtaggagagatcgttgcgcgggtaaacaaatggctgaccaatggaatacttgtaacacatcgctgccatggtcggcattttcgacagcaggcggaacgcggcaatttcacgatgacgaggattgttaacatccagcgagtcgtgatagaacgccgccagcgcgccggtaataccacacatgactgccattggatgtgagtcgcgacggaaagcgtggaacagacgggtaatctgctcgtggatcatggtatgacgggtcaccgtagttttaaattcgtcatactgttcctgagtcggtttttcaccattcagcaggatgtaacaaacttccaggtagttagaatcggtcgccagctgatcgatcgggaaaccgcggtgcagcaaaataccttcatcaccatcaataaaagtaattttagattcgcaggatgcggttgaagtgaagccagggtcaaaggtgaacacaccttttgaaccgagagtacggatatcaataacatcttgacccagcgtgcctttcagcacatccagttcaacagctgtgtccccgttgagggtgagttttgcttttgtatcagccatttaaggtctccttagcgccttattgcgtaagactgccggaacttaaatttgccttcgcacatcaacctggctttacccgtttgttatttggctcgccgctctgtgaaagaggggaaaacctgggtacagagctctgggcgcttgcaggtaaaggatccattgatgacgaataaatggcgaatcaagtacttagcaatccgaattattaaacttgtctaccactaataactgtcccgaatgaattggtcaatacttccacactgttacataagttaatcttaggtgaaataccgacttcataacttttacgcattatatgcttttcctggtaatgtttgtaacaactttgttgaatgattgtcaaattagatgattaaaaattaaataaatgttgttatcgtgacctagatcactgttcaggataaaacccgacaaactatatgtaggttaattgtaatgattttgtgaacgacctatactgccgccaggtctccggaacaccctgcaatcccgagccacccagcgttgtaacgtgtcgttttcgcatctggaagcagtgttttgcatgacgcgcagttatagaaaggacgctgtctgacccgcaagcagaccggaggaaggaaatcccgacgtctccaggtaacagaaagttaacctctgtgcccgtagtccccagggaataataagaacagcatgtgggcgttattcatgataagaaatgtgaaaaaacaaagacctgttaatctggacctacagaccatccggttccccatcacggcgatagcgtccattctccatcgcgtttccggtgtgatcacctttgttgcagtgggcatcctgctgtggcttctgggtaccagcctctcttcccctgaaggtttcgagcaagcttccgcgattatgggcagcttcttcgtcaaatttatcatgtggggcatccttaccgctctggcgtatcacgtcgtcgtaggtattcgccacatgatgatggattttggctatctggaagaaacattcgaagcgggtaaacgctccgccaaaatctcctttgttattactgtcgtgctttcacttctcgcaggagtcctcgtatggtaagcaacgcctccgcattaggacgcaatggcgtacatgatttcatcctcgttcgcgctaccgctatcgtcctgacgctctacatcatttatatggtcggttttttcgccaccagtggcgaactgacatatgaagtctggatcggtttcttcgcctctgcgttcaccaaagtgttcaccctgctggcgctgttttctatcttgatccatgcctggatcggcatgtggcaggtgttgaccgactacgttaaaccgctggctttgcgcctgatgctgcaactggtgattgtcgttgcactggtggtttacgtgatttatggattcgttgtggtgtggggtgtgtgatgaaattgccagtcagagaatttgatgcagttgtgattggtgccggcggcgcaggtatgcgcgcggcgctgcaaatttcccagagcggccagacctgtgcgctgctctctaaagtcttcccgacccgttcccataccgtttctgcgcaaggcggcattaccgttgcgctgggtaatacccatgaagataactgggaatggcatatgtacgacaccgtaaaagggtcggactatatcggtgaccaggacgcgattgaatatatgtgtaaaaccgggccggaagcgattctggaactcgaacacatgggcctgccgttctcgcgtcttgatgatggtcgtatctatcaacgtccgtttggcggtcagtcgaaaaacttcggcggcgagcaggcggcacgcactgcggcagcggctgaccgtaccggtcacgcactgttgcacacgctttatcagcagaacctgaaaaaccacaccaccattttctccgagtggtatgcgctggatctggtgaaaaaccaggatggcgcggtggtgggttgtaccgcactgtgcatcgaaaccggtgaagtggtttatttcaaagcccgcgctaccgtgctggcgactggcggggcagggcgtatttatcagtccaccactaacgcccacattaacactggcgacggtgtcggcatggctatccgcgcaggcgtaccggtgcaggatatggaaatgtggcaattccacccgaccggcattgccggtgcgggcgtactggtcaccgaaggttgccgtggtgaaggcggttatctgctgaacaaacatggcgaacgctttatggagcgttatgcgccgaacgccaaagacctggcgggccgtgatgtggtggcgcgttccatcatgattgaaatccgtgaaggtcgcggctgtgatggtccgtgggggccacacgcgaaactgaaactcgatcacctgggtaaagaagttctcgaatcccgtctgccgggtatcctggagctttcccgtaccttcgctcacgttgatccggtgaaagagccgattccggttatcccaacctgtcactacatgatgggcggtattccgaccaaagtgaccggtcaggcgctgactgtgaatgagaaaggcgaagatgtggttgttccggggctgttcgcggtaggtgaaattgcctgcgtatcggtacacggtgctaaccgtctgggcggtaactcgctgctggacctggtggtctttggtcgcgcagcgggtctgcatctgcaagagtctatcgccgagcagggcgcattgcgcgatgccagcgagtctgatgttgaagcatctctggatcgtctgaaccgctggaacaataatcgtaacggtgaagatccggtggcgattcgtaaagcgctgcaagaatgtatgcagcataacttctcggtcttccgtgaaggtgatgcgatggcgaaagggcttgagcagttgaaagttatccgcgagcgtctgaaaaatgcccgtctggatgacacttccagcgagttcaacacccagcgcgttgagtgtctggaactggataacctgatggaaacggcgtatgcaacggctgtttctgccaacttccgtaccgaaagccgtggcgcgcatagccgcttcgacttcccggatcgtgatgatgaaaactggctgtgccactccctgtatctgccagagtcggaatccatgacgcgccgaagcgtcaacatggaaccgaaactgcgcccggcattcccgccgaagattcgtacttactaatgcggagacaggaaaatgagactcgagttttcaatttatcgctataacccggatgttgatgatgctccgcgtatgcaggattacaccctggaagcggaagaaggtcgcgacatgatgttgctggatgcgcttatccagctgaaagagaaagatcccagcctgtcgttccgccgctcctgccgtgaaggtgtgtgcggttccgacggtctgaacatgaacggcaagaatggtctggcctgtattaccccgatttcggcactcaaccagccgggcaagaagattgtgattcgcccgctgccaggtttaccggtgatccgcgatttggtggtagacatgggacaattctatgcgcaatatgagaaaattaagccttacctgttgaataatggacaaaatccgccagctcgcgagcatttacagatgccagagcagcgcgaaaaactcgacgggctgtatgaatgtattctctgcgcatgttgttcaacctcttgtccgtctttctggtggaatcccgataagtttatcggcccggcaggcttgttagcggcatatcgtttcctgatcgatagccgtgataccgagactgacagccgcctcgacggtttgagcgatgcattcagtgtattccgctgtcacagcatcatgaactgcgtcagtgtatgtccgaaggggctgaacccgacgcgcgccatcggccatatcaagtcgatgttgttgcagcgtaatgcgtaaaccgtaggcctgataagacgcgcaagcgtcgcatcaggcaaccagtgccggatgcggcgtgaacgccttatccggcctacaagccattacccgtaggcctgataagcgcagtgcatcaggcgtaacaaagaaatgcaggaaatctttaaaaactgcccctgacactaagacagtttttaaaggttccttcgcgagccactacgtagacaagagctcgcaagtgaaccccggcacgcacatcactgtgcgtggtagtatccacggcgaagtaagcataaaaaagatgcttaagggatcacgatgcagaacagcgctttgaaagcctggttggactcttcttacctctctggcgcaaaccagagctggatagaacagctctatgaagacttcttaaccgatcctgactcggttgacgctaactggcgttcgacgttccagcagttacctggtacgggagtcaaaccggatcaattccactctcaaacgcgtgaatatttccgccgcctggcgaaagacgcttcacgttactcttcaacgatctccgaccctgacaccaatgtgaagcaggtaaaagtcctgcagctcattaacgcataccgcttccgtggtcaccagcatgcgaatctcgatccgctgggactgtggcagcaagataaagtggccgatctggatccgtctttccacgatctgaccgaagcagacttccaggagaccttcaacgtcggttcatttgccagcggcaaagaaaccatgaaactcggcgagctgctggaagccctcaagcaaacctactgcggcccgattggtgccgagtatatgcacatcaccagcaccgaagaaaaacgctggatccaacagcgtatcgagtctggtcgcgcgactttcaatagcgaagagaaaaaacgcttcttaagcgaactgaccgccgctgaaggccttgaacgttacctcggcgcaaaattccctggcgcaaaacgcttctcgctggaaggcggtgacgcgttaatcccgatgcttaaagagatgatccgccacgctggcaacagcggcacccgcgaagtggttctcgggatggcgcaccgtggtcgtctgaacgtgctggtgaacgtgctgggtaaaaaaccgcaagacttgttcgacgagttcgccggtaaacataaagaacacctcggcacgggtgacgtgaaataccacatgggcttctcgtctgacttccagaccgatggcggcctggtgcacctggcgctggcgtttaacccgtctcaccttgagattgtaagcccggtagttatcggttctgttcgtgcccgtctggacagacttgatgagccgagcagcaacaaagtgctgccaatcaccatccacggtgacgccgcagtgaccgggcagggtgtggttcaggaaactctgaacatgtcgaaagcgcgtggttatgaagttggcggtacggtacgtatcgttatcaacaaccaggttggtttcaccacctctaatccgctggatgctcgttctacaccgtactgtactgatatcggtaagatggttcaggcaccgattttccacgttaacgcggatgatccggaagccgttgcctttgtgacccgtctggcgctcgatttccgtaacacctttaaacgtgatgtcttcatcgacctggtgtgctaccgccgtcacggccacaacgaagccgacgagccgagcgcaacccagccgctgatgtatcagaaaatcaaaaaacatccgacgccgcgcaaaatctatgctgacaagctggagcaggaaaaagtggcgacgctggaagatgccaccgagatggttaacctgtaccgcgatgcgctggatgctggcgattgcgtagtggcagagtggcgtccgatgaacatgcactctttcacctggtcgccgtatctcaaccacgaatgggacgaagagtacccgaacaaagttgagatgaagcgcctgcaggaactggctaaacgcatcagcacggtgccggaagcggttgaaatgcagtctcgcgttgccaaaatttatggcgatcgccaggcgatggctgccggtgagaaactgttcgactggggcggcgcggaaaacctcgcttacgccacgctggttgacgaaggcattccggttcgcctgtcgggtgaagactccggtcgcggtaccttcttccaccgccacgcggtgatccacaaccagtctaacggttccacttacacgccgctgcaacacatccataacggccagggcgcgttccgtgtctgggactccgtactgtctgaagaagcagtgctggcgtttgaatacggttatgccaccgcagaaccacgcactctgactatctgggaagcgcagttcggtgacttcgccaacggtgcgcaggtggttatcgaccagttcatctcctctggcgaacagaaatggggccggatgtgtggtctggtgatgttgctgccgcacggttatgaagggcaggggccggagcactcctccgcgcgtctggaacgttatctgcaactttgtgctgagcaaaacatgcaggtgtgcgtaccgtctaccccggcacaggtttaccacatgctgcgtcgtcaggcgctgcgcgggatgcgtcgtccgctggtcgtgatgtcgccgaaatccctgctgcgtcatccgctggcggtttccagcctcgaagaactggcgaacggcaccttcctgccagccatcggtgaaatcgacgagcttgatccgaagggtgtgaagcgcgtagtgatgtgttctggtaaggtttattacgacctgctggaacaacgtcgtaagaacaatcaacacgatgtcgccattgtgcgtatcgagcaactctacccgttcccgcataaagcgatgcaggaagtgttgcagcagtttgctcacgtcaaggattttgtctggtgccaggaagagccgctcaaccagggcgcatggtactgcagccagcatcatttccgtgaagtgattccgtttggggcttctctgcgttatgcaggccgcccggcctccgcctctccggcggtagggtatatgtccgttcaccagaaacagcaacaagatctggttaatgacgcgctgaacgtcgaataaataaaggatacacaatgagtagcgtagatattctggtccctgacctgcctgaatccgtagccgatgccaccgtcgcaacctggcataaaaaacccggcgacgcagtcgtacgtgatgaagtgctggtagaaatcgaaactgacaaagtggtactggaagtaccggcatcagcagacggcattctggatgcggttctggaagatgaaggtacaacggtaacgtctcgtcagatccttggtcgcctgcgtgaaggcaacagcgccggtaaagaaaccagcgccaaatctgaagagaaagcgtccactccggcgcaacgccagcaggcgtctctggaagagcaaaacaacgatgcgttaagcccggcgatccgtcgcctgctggctgaacacaatctcgacgccagcgccattaaaggcaccggtgtgggtggtcgtctgactcgtgaagatgtggaaaaacatctggcgaaagccccggcgaaagagtctgctccggcagcggctgctccggcggcgcaaccggctctggctgcacgtagtgaaaaacgtgtcccgatgactcgcctgcgtaagcgtgtggcagagcgtctgctggaagcgaaaaactccaccgccatgctgaccacgttcaacgaagtcaacatgaagccgattatggatctgcgtaagcagtacggtgaagcgtttgaaaaacgccacggcatccgtctgggctttatgtccttctacgtgaaagcggtggttgaagccctgaaacgttacccggaagtgaacgcttctatcgacggcgatgacgtggtttaccacaactatttcgacgtcagcatggcggtttctacgccgcgcggcctggtgacgccggttctgcgtgatgtcgataccctcggcatggcagacatcgagaagaaaatcaaagagctggcagtcaaaggccgtgacggcaagctgaccgttgaagatctgaccggtggtaacttcaccatcaccaacggtggtgtgttcggttccctgatgtctacgccgatcatcaacccgccgcagagcgcaattctgggtatgcacgctatcaaagatcgtccgatggcggtgaatggtcaggttgagatcctgccgatgatgtacctggcgctgtcctacgatcaccgtctgatcgatggtcgcgaatccgtgggcttcctggtaacgatcaaagagttgctggaagatccgacgcgtctgctgctggacgtgtagtagtttaagtttcacctgcactgtagaccggataaggcattatcgccttctccggcaattgaagcctgatgcgacgctgacgcgtcttatcaggcctacgggaccaccaatgtaggtcggataaggcgctagcgccgcatccgacaagcgatgcctgatgtgacggttaacgtgtcttatcaggcctacggggaccaccaatgtaggtcggataaggcgcaagcgccgcatccgacaagcgatgcctgatgtgacgtttaacgtgtcttatcaggcctacgggtgaccgacaatgcccggaagcgatacgaaatattcggtctacggtttaaaagataacgattactgaaggatggacagaacacatgaacttacatgaatatcaggcaaaacaactttttgcccgctatggcttaccagcaccggtgggttatgcctgtactactccgcgcgaagcagaagaagccgcttcaaaaatcggtgccggcccgtgggtagtgaaatgtcaggttcacgctggtggccgcggtaaagcgggcggtgtgaaagttgtaaacagcaaagaagacatccgtgcttttgcagaaaactggctcggcaagcgtctggtaacgtatcaaacagatgccaatggccaaccggttaaccagattctggttgaagcagcgaccgatatcgctaaagagctgtatctcggtgccgttgtagaccgtagttcccgtcgtgtggtctttatggcctccaccgaaggcggcgtggaaatcgaaaaagtggcggaagaaactccgcacctgatccacaaagttgcgcttgatccgctgactggcccgatgccgtatcagggacgcgagctggcgttcaaactgggtctggaaggtaaactggttcagcagttcaccaaaatcttcatgggcctggcgaccattttcctggagcgcgacctggcgttgatcgaaatcaacccgctggtcatcaccaaacagggcgatctgatttgcctcgacggcaaactgggcgctgacggcaacgcactgttccgccagcctgatctgcgcgaaatgcgtgaccagtcgcaggaagatccgcgtgaagcacaggctgcacagtgggaactgaactacgttgcgctggacggtaacatcggttgtatggttaacggcgcaggtctggcgatgggtacgatggacatcgttaaactgcacggcggcgtaccggctaacttccttgacgttggcggcggcgcaaccaaagaacgtgtaaccgaagcgttcaaaatcatcctctctgacgacaaagtgaaagccgttctggttaacatcttcggcggtatcgttcgttgcgacctgatcgctgacggtatcatcggcgcggtagcagaagtgggtgttaacgtaccggtcgtggtacgtctggaaggtaacaacgccgaactcggcgcgaagaaactggctgacagcggcctgaatattattgcagcaaaaggtctgacggatgcagctcagcaggttgttgccgcagtggaggggaaataatgtccattttaatcgataaaaacaccaaggttatctgccagggctttaccggtagccaggggactttccactcagaacaggccattgcatacggcactaaaatggttggcggcgtaaccccaggtaaaggcggcaccacccacctcggcctgccggtgttcaacaccgtgcgtgaagccgttgctgccactggcgctaccgcttctgttatctacgtaccagcaccgttctgcaaagactccattctggaagccatcgacgcaggcatcaaactgattatcaccatcactgaaggcatcccgacgctggatatgctgaccgtgaaagtgaagctggatgaagcaggcgttcgtatgatcggcccgaactgcccaggcgttatcactccgggtgaatgcaaaatcggtatccagccgggtcacattcacaaaccgggtaaagtgggtatcgtttcccgttccggtacactgacctatgaagcggttaaacagaccacggattacggtttcggtcagtcgacctgtgtcggtatcggcggtgacccgatccctggctctaactttatcgacattctcgaaatgttcgaaaaagatccgcagaccgaagcgatcgtgatgattggtgagatcggcggtagcgctgaagaagaagcggcagcgtacatcaaagagcacgttaccaagccagttgtgggctacattgctggtgtgactgcgccgaaaggcaaacgtatgggccacgcgggtgccatcattgccggtgggaaagggactgcggatgagaaattcgctgctctggaagccgcaggcgtgaaaaccgttcgcagcctggcggatatcggtgaagcactgaaaactgttctgaaataaatatctgtaataagaaatagccctcgccgcttccctctacaggaatggcgaagggctgtcggtttcgacatggttggccatcgtatgatggccttttttgtgcttatcgcgatgattttcgctgcgctatcagggtaaatttatagtcatcggtattaaaagcgttgcggctatattcaaacacccgaccatcaactaaatatccacgcgatactttttcaagaatcggctttgtctggctgatattaagcagacggctcatctcttcggttggcatcagaggaatgatttcctgttcgctacgctcgataaccattttcttcacttcttcaataaagtgatatttcgaattttccatgacctgccaggtgagatccgggaacaacgcaagcggcatccaggtttcttccagcgccattggcttttgcttgcgatagcgcacgcgcttcacatgccacacacgatcctgcgcggtgatttgtagctgttgctgaagaaaatcgtcagccggaatcacttcaaatatcaggacttcactgtgtgtatcgacgtgacggtccgacagtttttcatcaaaactggttaactgaaaaatatcgtaattgacccgctcttctttgacgtaagtcccgctgccctgaatgctttcgaggatctgctgctcgactagctggcgcaaagcctgacgcaccgtaacccggctggcgccaaactctgtttgtaatgcagattcggtaggtaacgcatcgccaggtttaagctccccacgcgcaatttgctcacgaatgcgatcggcaatctgccggtataagggtttgtgtcccatttttagtatctcattaatacgaatttagccattatgcccgataaattcatcctgtaaataatacaaatacaatacaaataatttcaatcaagtgaaattgatcacataatggtattgttttatcgggcacgctggcgcgactataaaaacgatcaagtgaggatcatgatgaatctgacgactctgacccaccgcgatgcgttgtgtctgaatgcgcgctttaccagccgtgaagaggccatccacgtgttgactcaacgtcttgctgctctggggaaaatttccagtactgagcaatttctggaagaagtgtatcgccgtgaaagccttggcccgaccgccttaggtgaagggttggctgtgccgcatggcaaaactgctgcggtaaaagaagcggcgtttgcggtcgccacactcagcgagccgcttcagtgggaaggcgttgatggcccggaagcagttgatttagtggtgctgctggcgattccccccaatgaagcgggtactacgcatatgcaactgctgacagcgctgaccacgcgccttgcggatgatgagattcgggcgcgtatacagtcggcgacgacgcctgatgagttgctctcggcgctggatgacaagggaggcacgcaaccttctgcctctttttccaacgcgccaactatcgtctgcgtaacggcctgtccggcgggtattgctcacacctatatggctgcggaatatctggaaaaagccggacgcaaactcggcgtaaatgtttacgttgaaaaacaaggcgctaacggcattgaagggcgtttaacggcggatcaactcaatagtgcaaccgcctgtatttttgcggctgaagtcgccatcaaggagagtgagcgttttaatggcattcccgcgctttcagtgcctgttgccgagccgattcgccatgcagaagcgttgatccaacaagcgcttaccttcaagcgtagcgatgagacgcgtaccgtacagcaagatacgcaaccggtgaaaagtgtcaaaacggagctgaaacaggcactgttgagcggaatctcttttgccgtaccgttgattgtcgcggggggcacggtgctggcggtcgcggtattactgtcgcaaatcttcgggctacaagatctgtttaatgaagaaaactcctggctgtggatgtaccgcaagctgggcggcgggctgctcggaattttgatggtaccggtgctcgcggcctataccgcctattctctggcagataaaccggcgttagcgccaggctttgcggctggacttgccgccaacatgatcggctccgggtttctcggcgcggtcgttggcggattgatagccggttacttgatgcgctgggtgaaaaatcacttgcgtcttagcagtaaattcaatggattcctgactttttatctctacccggtgctcggtacgttgggagcgggcagtctgatgctgtttgtggtgggggaacctgtcgcctggatcaataactcgcttaccgcctggctgaacggtctgtcaggaagtaacgcgctgttgctgggtgccattctcggttttatgtgttcctttgaccttggagggccagtgaataaagccgcttatgcattctgcctgggcgcaatggcgaacggcgtttacggcccgtatgccattttcgcctccgtcaaaatggtttcggcatttaccgtaaccgcttccacgatgctcgcaccgcgcctgtttaaagagtttgaaattgagaccgggaaatccacctggctgttagggctggcaggtattaccgaaggggcgatcccgatggcgattgaagatccgctgcgggttattggttcgtttgtgctgggctctatggtaacgggcgctattgtcggtgcgatgaatatcggcctttcgacacccggtgccgacattttctcgctctttttacttcatgataatggcgcgggcggtgttatggcggcaattggctggtttggcgcggcattggtgggggctgcaatctcgactgcaattctcctgatgtggcggcgtcacgcggttaagcatggcaactatctgactgatggcgtaatgccataaacaaaaaggaaacgacgatgaaagcagtatctcgcgttcacatcaccccgcatatgcactgggatcgagagtggtatttcaccaccgaagagtcacgtattctgctggtcaataatatggaagagatcctgtgccgactggaacaggacaacgaatacaaatattacgtactcgacgggcaaacggcgatcctcgaagattatttcgcggtgaaaccggaaaacaaagaccgtgtgaagaaacaggtagaagccggcaagttgattatcggcccctggtatacccagaccgataccacgattgtttctgcggaatccatcgtccgtaatctgatgtacggaatgcgtgactgcctcgcgtttggcgagccgatgaaaataggttatttaccagattcctttggcatgtccgggcaactgccgcatatctacaatggatttggcattacccgcaccatgttctggcgcggatgttcggagcgccacggtactgataaaaccgagtttttgtggcaaagcagtgacggtagcgaagtgacggcgcaggtgctgccgctgggctacgccatcggtaagtacttacctgccgacgaaaacggattacgtaaacgcctcgacagttattttgacgtgctggaaaaagcgtctgtaaccaaagagattttgctgccgaatgggcatgaccagatgccattgcagcaaaatatcttcgaagtgatggataagctacgtgagatctaccctcaacgtaagtttgtgatgagccgctttgaagaggtatttgagaagatcgaagcgcagcgagataatctggcaaccctgaaaggggaatttattgatggcaaatatatgcgcgtgcatcgcaccatcggttctacgcgtatggatatcaaaattgcccacgcgcgtattgaaaataagattgttaatctgctggaaccgctggcaacactggcctggacgttgggttttgaataccaccacggcttgctggagaaaatgtggaaagagatcttaaaaaatcatgcccacgacagtatcggctgctgctgtagtgacaaagttcatcgcgaaatcgtcgcccgcttcgaactggctgaagacatggcggataatctgattcgtttctacatgcgcaaaattgccgacaacatgccgcagagcgacgccgacaaactcgtcctgtttaacctgatgccctggccgcgtgaagaagttatcaacaccactgtgcggctgcgcgccagccagtttaatttgcgggacgatcgcggtcagcctgtaccgtattttattcgccatgcccgtgagatcgatccaggcctaatcgatcggcaaatagttcattacggtaattacgatccctttatggagtttgatatacagatcaaccagattgtcccttctatgggctatcgcacgctttatatcgaagcgaatcagcctggcaacgtaattgcggcaaaaagtgacgctgaagggatactggaaaatgctttctggcaaattgcgctcaatgaggatggttctctgcaactggtagataaagacagcggtgtgcgctatgaccgggtattgcaaattgaagaaagctctgatgatggtgatgaatatgactattcacccgcaaaagaagagtgggtaattaccgcagcgaacgcgaaaccgcaatgcgatattattcatgaagcctggcagagcagggctgttatccgctatgacatggcagtgccgctcaatttgtcagaacgcagcgcccggcaatccactggcagagtaggggtggtgttggttgtcactcttagtcataacagcaggcgtattgatgtggatatcaatcttgataaccaggctgacgatcatcgccttcgtgtcctggtccctacaccttttaacaccgacagtgttctggcagatacgcagtttggttcgctaacgcgccccgtgaacgacagtgcaatgaacaactggcagcaagaaggctggaaagaagcgccggttccggtatggaatatgctcaactatgttgccttacaggaagggcgtaacggcatggctgtctttagcgaagggttacgtgaatttgaagtcatcggtgaagagaagaaaacctttgccattacgttgctgcgtggcgtgggcttactgggcaaagaagatctgcttttaaggcctgggcggccttcgggaattaaaatgccagtcccggactcacaactacgtggtctgctttcttgtcgcctaagtttattgagttataccggtacgccaaccgccgctggtgtagctcagcaggcgcgagcatggctgactccagtacagtgttacaacaaaatcccatgggatgtgatgaagctcaacaaagccggattcaacgtgccggaaagttatagtttgttgaaaatgcccccagtgggatgcctgataagcgcacttaagaaagctgaagaccgacaagaagtgattttacggctgtttaatccggctgaatcagcaacctgtgatgcgactgttgctttcagtcgcgaggtgatttcttgctcagaaacgatgatggatgaacacattaccaccgaggaaaatcaaggttcaaatctatcggggccttttttacccggccagtcacggacgttcagttaccggcttgcctgaatagcaatcaaaccgaagccacatatgcgcggccagattgttgacaaagggcgctttgttcatgccggatacggcatgaacgctttattcggtctacaaaagcaggcaaattcaatatattgcagagatgatgtagacactggcaagcgtagcgcatcaggtaattttgcgtttatcttcactctcaagccacgtatatgtggctttatttttaacaaaataataaccctgggtgagttaattataatataattataagttaactaaatgttaatattggcggggtggatttatgcctttattagtaatcctgaaactctgcgtcgtattagccagtgaccaaaaaagaattaaggtcaaccgtgctgtttttgcttcgtctctttttatctttaattgccaaccgaaactaatttcagccttataactcacacattttaaacataaatgtcactaaagttaccttattgaaacatgattaacataatttgtaggaattgatatttatcaatgtataagtcttggaaatgggcatcaaaaagagataaattgttctcgatcaaattggctgaaaggcggtaatttagctataaattgatcaccgtcgaaaaatgcaaatttgcttcaacaaaaacctgtttattgtaaggattttgcggcgtaatatatacgtgggatcaatttgagtttttattaacatgtttgcaacctttctttacgccgtttttgtgtgcattcacatggtatgatgaaagtgttcaaacaaatttctattggggcatgcgtgtgaccctttctaacggggttcactctcggagtcttcatgcgatgagcaaggagtcatgatgttagatatagtcgaactgtcgcgcttacagtttgccttgaccgcgatgtaccacttcctttttgtgccactgacgctcggtatggcgttcctgctggccattatggaaacggtctacgtcctctccggcaaacagatttataaagatatgaccaagttctggggcaagttgtttggtatcaacttcgctctgggtgtggctaccggtctgaccatggagttccagttcgggactaactggtcttactattcccactatgtaggggatatcttcggtgcgccgctggcaatcgaaggtctgatggccttcttcctcgaatccacctttgtaggtctgttcttcttcggttgggatcgtctgggtaaagttcagcatatgtgtgtcacctggctggtggcgctcggttcaaacctgtccgcactgtggattctggttgcgaacggctggatgcaaaacccaatcgcgtccgatttcaactttgaaactatgcgtatggagatggtgagcttctccgagctggtgcttaacccggttgctcaggtgaaattcgttcacactgtagcgtctggttatgtgactggcgcgatgttcatcctcggtatcagcgcatggtatatgctgaaaggtcgtgacttcgccttcgctaaacgctcctttgctatcgctgccagcttcggtatggctgctgttctgtctgttattgttctgggtgatgaatccggctacgaaatgggcgacgtgcagaaaaccaaactggctgctattgaagccgagtgggaaacgcaacctgcgcctgctgcctttactctgttcggcattcctgatcaggaagaggagacgaacaaatttgcgattcagatcccttacgcactgggcatcattgcaacgcgttccgtggataccccggttatcggcctgaaagagctgatggtgcagcatgaagaacgcattcgtaacgggatgaaggcgtactctctgctcgaacaactgcgttctggttctaccgaccaggcggttcgtgaccagttcaatagcatgaagaaagacctcggttacggtctgctgctgaaacgctatacgccaaacgtggctgatgcgactgaagcgcagattcaacaggcaaccaaagactccatcccgcgtgtagcgccgctgtactttgcgttccgtatcatggtggcgtgtggcttcctgcttctggcaatcatcgcgctctctttctggagtgtcatccgcaaccgcattggcgagaaaaaatggcttctgcgcgccgcgctgtacggtattccgctgccgtggattgctgtagaagcgggctggttcgtggctgaatatggccgccaaccgtgggctatcggtgaagtgctgccgacagctgtggcgaactcgtcactgaccgcaggcgatctcatcttctcaatggtgctgatttgcggcctgtataccctgttcctggtggcagaattgttcttaatgttcaagtttgcacgcctcggcccaagcagcctgaaaaccggtcgctatcactttgagcagtcttccacgactactcagccggcacgctaagacaggagtcgtcaaatgatcgattatgaagtattgcgttttatctggtggctgctggttggcgttctgctgattggttttgcagtcactgacggtttcgacatgggggtgggcatgctcacccgtttcctcggtcgtaacgacaccgagcgtcgaattatgattaactccattgcaccacactgggacggtaaccaggtttggctgatcaccgcgggcggcgcactctttgctgcctggccgatggtctatgccgctgcgttctccggcttctatgtggcgatgatcctcgtgctggcgtctttgttcttccgtccggtcggttttgactaccgctccaagattgaagaaacccgctggcgtaacatgtgggactggggcatcttcattggtagcttcgttccgccgctggtaattggtgtagcgttcggtaacctgttgcagggcgtaccgttcaacgttgatgaatatctgcgtctgtactacaccggtaacttcttccagttgcttaacccgttcggcctgctggcaggcgtggtgagcgtagggatgatcattactcagggcgcaacctatctgcaaatgcgtaccgtgggcgaactgcacctgcgtacccgtgcaacggctcaggtggctgcgctggtgacactggtctgtttcgcactggctggcgtatgggtgatgtacggtatcgatggttatgtcgtgaaatcgacaatggaccattacgcagcctctaacccactgaataaagaagtggttcgtgaagctggcgcatggctggttaacttcaacaacacgccaattctgtgggctattccggcactgggtgtggttctgccgctgctgaccatcctgactgcacgtatggataaagccgcgtgggcgtttgtgttctcctccctgactctggcctgcatcatcctgacagccggtatcgcaatgttcccgtttgtgatgccgtccagcaccatgatgaacgcaagtctgacaatgtgggatgcaacttccagccagctgacgcttaacgtcatgacctgggttgcggtggttctggtaccgatcattctgctctacaccgcctggtgttactggaaaatgttcggtcgtatcaccaaagaagatattgaacgtaacacccactctctgtactaagtaaggagctaaaaatgtggtatttcgcatggattctgggaacgcttcttgcctgttcgtttggggtaatcaccgcgctggcgcttgaacacgtcgaatcaggcaaagccggtcaagaagacatctgatgagtaagattatcgcgactttgtatgcggtaatggacaagcgccccctgcgggcgctttccttcgtgatggcgcttctgttagcaggatgtatgttttgggacccatctcgttttgccgcgaagaccagtgaactggaaatctggcatggtttattgctgatgtgggccgtctgtgctggtgtgattcacggcgtgggctttcgtccgcagaaggttctttggcaagggattttttgcccattgcttgccgatattgttctcattgtcgggctgattttcttcttcttttaaatcagaattctctttaaaaaattatgggccgctccaggcccataaatttttacgctcccttaacttgccctcattcccaaacctcaatcgcgcgcgtatagtagcagcgtttaaaagctctaacttttgttgcattaccgggatgtaaagtgaatacaacgctgtttcgatggccggttcgcgtctactatgaagataccgatgccggtggtgtggtgtaccacgccagttacgtcgctttttatgaaagagcacgcacagagatgctgcgtcatcatcacttcagtcagcaggcgctgatggctgaacgcgttgcctttgtggtacgtaaaatgacggtggaatattacgcacctgcgcggctcgacgatatgctcgaaatacagactgaaataacatcaatgcgtggcacctctttggttttcacgcaacgtattgtcaacgccgagaatactttgctgaatgaagcagaggttctggttgtttgcgttgacccactcaaaatgaagcctcgtgcgcttcccaagtctattgtcgcggagtttaagcagtgactgacatgaatatccttgatttgttcctgaaggctagccttctggttaaacttatcatgttgattttgattggtttttcaatcgcatcttgggccattattatccagcggacccgtattcttaacgcagcggcgcgcgaagccgaagcgtttgaagataaattctggtctggaatcgaactctctcgcctctatcaagagagccaggggaaacgggataatctgactggttcggaacaaatcttttacagcgggttcaaagagtttgtgcgcctgcatcgtgccaatagccatgcgccggaagccgtagtggaaggggcgtcgcgtgctatgcgtatctccatgaaccgtgaacttgaaaatctggaaacgcacattccgttcctcggtacggttggctccatcagcccgtatattggtctgtttggtacggtctgggggatcatgcacgcctttatcgccctcggggcggtaaaacaagcaacactgcaaatggttgcgcccggtatcgcagaagcgttgattgcgactgcaattggtctgtttgccgctatcccggcagttatggcctacaaccgcctcaaccagcgcgtaaacaaactggaactgaattacgacaactttatggaagagtttaccgcgattctgcaccgccaggcgtttaccgttagcgagagcaacaaggggtaagccatggccagagcgcgtggacgaggtcgtcgcgatctcaagtccgaaatcaacattgtaccgttgctggacgtactgctggtgctgttgctgatctttatggcgacagcgcccatcatcacccagagcgtggaggtcgatctgccagacgctactgaatcacaggcggtgagcagtaacgataatccgccagtgattgttgaagtgtctggtattggtcagtacaccgtggtggttgagaaagatcgcctggagcgtttaccaccagagcaggtggtggcggaagtgtccagccgtttcaaggccaacccgaaaacggtctttctgatcggtggcgcaaaagatgtgccttacgatgaaataattaaagcactgaacttgttacatagtgcgggtgtgaaatcggttggtttaatgacgcagcctatctaaacatctgcgtttcccttgcttgaaagagagcgggtaacaggcgaacagtttttggaaaccgagagtgtcaaaggcaaccgaacaaaacgacaagctcaagcgggcgataattatttcagcagtgctgcatgtcatcttatttgcggcgctgatctggagttcgttcgatgagaatatagaagcttcagccggaggcggcggtggttcgtccatcgacgctgtcatggttgattcaggtgcggtagttgagcagtacaaacgcatgcaaagccaggaatcaagcgcgaagcgttctgatgaacagcgcaagatgaaggaacagcaggctgctgaagaactgcgtgagaaacaagcggctgaacaggaacgcctgaagcaacttgagaaagagcggttagcggctcaggagcagaaaaagcaggctgaagaagccgcaaaacaggccgagttaaagcagaagcaagctgaagaggcggcagcgaaagcggcggcagatgctaaagcgaaggccgaagcagatgctaaagctgcggaagaagcagcgaagaaagcggctgcagacgcaaagaaaaaagcagaagcagaagccgccaaagccgcagccgaagcgcagaaaaaagccgaggcagccgctgcggcactgaagaagaaagcggaagcggcagaagcagctgcagctgaagcaagaaagaaagcggcaactgaagctgctgaaaaagccaaagcagaagctgagaagaaagcggctgctgaaaaggctgcagctgataagaaagcggcagcagagaaagctgcagccgacaaaaaagcagcagaaaaagcggctgctgaaaaggcagcagctgataagaaagcagcggcagaaaaagccgccgcagacaaaaaagcggcagcggcaaaagctgcagctgaaaaagccgctgcagcaaaagcggccgcagaggcagatgatattttcggtgagctaagctctggtaagaatgcaccgaaaacggggggaggggcgaaagggaacaatgcttcgcctgccgggagtggtaatactaaaaacaatggcgcatcaggggccgatatcaataactatgccgggcagattaaatctgctatcgaaagtaagttctatgacgcatcgtcctatgcaggcaaaacctgtacgctgcgcataaaactggcacccgatggtatgttactggatatcaaacctgaaggtggcgatcccgcactttgtcaggctgcgttggcagcagctaaacttgcgaagatcccgaaaccaccaagccaggcagtatatgaagtgttcaaaaacgcgccattggacttcaaaccgtaatcgcgatgttgactgttcggacggtcaacatcaggcaccggttgccacggggttctggtagttttgtgtattttagtttgttaacattctgctaaattatcgtgggccatcggtccagataagggagatatgatgaagcaggcattacgagtagcatttggttttctcatactgtgggcatcagttctgcatgctgaagtccgcattgtgatcgacagcggtgtagattccggtcgtcctattggtgttgttcctttccagtgggcggggcctggtgcggcacctgaagatattggcggcatcgttgctgctgacttgcgtaacagcggtaaatttaatccgttagatcgcgctcgtctgccacagcagccgggtagtgcgcaggaagtacaaccagctgcatggtccgcactgggcattgacgctgtagttgtcggtcaggtcactccgaatccggatggttcttacaatgttgcttatcaacttgttgacactggcggcgcaccgggtactgtacttgctcagaactcgtacaaagtgaacaagcagtggctgcgttatgctggtcataccgccagtgatgaagtgtttgaaaaactgaccggcattaaaggtgcgttccgtactcgtattgcctacgttgttcagaccaacggcggtcagttcccgtatgaactgcgcgtatctgactatgacggttacaaccagtttgtcgttcaccgttcaccgcagccgctgatgtctccggcgtggtcaccagacggttctaaactggcttatgtgaccttcgaaagcggtcgttccgcgctggttattcagacgctggcaaatggcgctgtacgtcaggtggcttcattcccgcgtcacaacggtgcacctgcattctcgccagacggcagcaaactggcattcgccttgtcgaaaaccggtagtctgaacctgtacgtaatggatttggcttctggtcagatccgccaggtgactgatggtcgcagtaacaataccgaaccgacctggttcccggatagccagaacctggcatttacttctgaccaggccggtcgtccgcaggtttataaagtgaatatcaacggcggtgcgccacaacgtattacctgggaaggttcgcagaaccaggatgcggatgtcagcagcgacggtaaatttatggtaatggtcagctccaatggtgggcagcagcacattgccaaacaagatctggcaacgggaggcgtacaagttctgtcgtccacgttcctggatgaaacgccaagtctggcacctaacggcactatggtaatctacagctcttctcaggggatgggatccgtgctgaatttggtttctacagatgggcgtttcaaagcgcgtcttccggcaactgatggacaggtcaaattccctgcctggtcgccgtatctgtgataataattaattgaatagtaaaggaatcattgaaatgcaactgaacaaagtgctgaaagggctgatgattgctctgcctgttatggcaattgcggcatgttcttccaacaagaacgccagcaatgacggcagcgaaggcatgctgggtgccggcactggtatggatgcgaacggcggcaacggcaacatgtcttccgaagagcaggctcgtctgcaaatgcaacagctgcagcagaacaacatcgtttacttcgatctggacaagtacgatatccgttctgacttcgctcaaatgctggatgcacatgcaaacttcctgcgtagcaacccgtcttacaaagtcaccgtagaaggtcacgcggacgaacgtggtactccggaatacaacatctccctgggtgaacgtcgtgcgaacgccgttaagatgtacctgcagggtaaaggcgtttctgcagaccagatctccatcgtttcttacggtaaagaaaaacctgcagtactgggtcatgacgaagcggcatactccaaaaaccgtcgtgcggtactggtttactaagagaattgcatgagcagtaacttcagacatcaactattgagtctgtcgttactggttggtatagcggccccctgggccgcttttgctcaggcaccaatcagtagtgtcggctcaggctcggtcgaagaccgcgtcactcaacttgagcgtatttctaatgctcacagccagcttttaacccaactccagcaacaactttctgataatcaatccgatattgattccctgcgtggtcagattcaggaaaatcagtatcaactgaatcaggtcgtggagcggcaaaagcagatcctgttgcagatcgacagcctcagcagcggtggtgcagcggcgcaatcaaccagcagcgatcaaagcggtgcggcggcatcaacgacgccgacagctgatgctggtactgcgaatgctggcgcgccggtgaaaagcggcgatgcaaacacggattacaatgcagctattgcgctggtgcaggataaatcccgccaggatgacgcaatggtggcatttcagaatttcatcaaaaattaccctgattcaacttacctgccaaacgccaattattggctgggtcagttaaactacaacaagggtaaaaaagatgatgcggcgtactattttgcttcggtagtgaaaaactatccgaagtcaccaaaggctgctgatgcgatgtttaaagtcggcgtcatcatgcaggacaaaggtgacaccgcaaaagcgaaagccgtataccagcaggttatcagtaaataccctggtactgatggcgctaaacaggcacaaaaacgtctgaacgcgatgtaatgcataacacacgaccagaagtcgcattatttctggtcgtgtcgtgcgaatcataagcagttgagtgatctgcatcgaaatttttgttgcgctcaagtctgaaatcagtaatatatgccgccgttgccacgggatatcaaacaaaccgaaagcaacgaaaaagtgggtcgttagctcagttggtagagcagttgacttttaatcaattggtcgcaggttcgaatcctgcacgacccaccaatcgctaaggtggaagcggtagtaaaacgtgaaggataacgttgcatcagcaacggcccgaagggcgagacgaagtcgagtcatcctgcacgacccaccactaacatagttagttgtagtatccagcgtagtattgggtgattagctcagctgggagagcacctcccttacaaggagggggtcggcggttcgatcccgtcatcacccaccaccgggtcgttagctcagttggtagagcagttgacttttaatcaattggtcgcaggttcgaatcctgcacgacccaccactaattacggtgggttcggtggaagtagtttgtagtatccagcgcagtatcgggtgattagctcagctgggagagcacctcccttacaaggagggggtcggcggttcgatcccgtcatcacccaccactcgggtcgttagctcagttggtagagcagttgacttttaatcaattggtcgcaggttcgaatcctgcacgacccaccagttttaacatcaaactcagatgttaagcgtgaaggataacgttacgccagcaacggcccgtagggcgagcgaagcgagtcatcctgcacgagccaccaattttaaagattggttccgagtagaaatctttcaggtaacacccatatgggtcgttagctcagttggtagagcagttgacttttaatcaattggtcgcaggttcgaatcctgcacgacccaccaatttaaaggtggttactggtagagaacgtgaaggataacgttgcgttagcaacggcccgaagggtgagacgaagtccagtcatcctgcacgacccaccatcctgaatgattaaagcagcataatcccgcaaggggtcgttagctcagttggtagagcagttgacttttaatcaattggtcgcaggttcgaatcctgcacgacccaccaatgtaaaaaagcgccctaaaggcgcttttttgctattcaggcatctctcaatttcaattcttgaccctgatgacatactccgcgcttgctgcgtaaacaactttacgtcggaggaataagacgcaaagtgtggcattcggcatctcatacgtaattcgagtgacttttccccaccattcgactatcttgtttagcatataaaacaaattacaccgataacagcgaatattacgctaatgtcggttttaatgttaagcctgtaaaacgagatggtaagatgagcgtaatgtttgatccagacacggcgatttatcctttccccccgaagccgacgccgttaagcattgatgaaaaagcgtattaccgcgagaagataaaacgtctgctaaaagaacgtaatgcggtgatggttgcccactactataccgatcccgaaattcaacaactggcagaagaaaccggtggctgtatttctgattctctggaaatggcgcgcttcggtgcaaagcatcccgcttctactttgttagtcgctggggtgagatttatgggagaaaccgccaaaattctcagtccggaaaaaacaattctgatgccgacacttcaggctgaatgttcactggatctcggctgccctgttgaagaatttaacgcattttgcgatgcccatcccgatcgtactgtcgtcgtctacgccaacacttctgctgcggtaaaagcgcgcgcagattgggtggtaacttcaagcattgccgtcgaacttattgatcatcttgatagtttgggtgaaaaaatcatctgggcacccgacaaacatctggggcgttacgtgcaaaaacagacgggtggagacattctatgctggaagggtgcctgtattgtgcatgatgaatttaagactcaggcgttaacccgcttgcaagaagaatacccggatgctgccatactggtgcatccagaatcaccacaagctattgtcgatatggcggatgcggtcggttccaccagtcaactgatcgctgctgcgaaaacattgccacatcagaggcttattgtggcaaccgatcggggtattttctacaaaatgcagcaggcggtgccagataaagagttactggaagcaccaaccgcaggtgagggtgcaacctgccgcagctgcgcgcattgtccgtggatggccatgaatggccttcaggccatcgcagaggcattagaacaggaaggaagcaatcacgaggttcatgttgatgaaaggctgcgagagagggcgctggtgccgctcaatcgtatgctggattttgcggctacactacgtggataacgaataataaggcgtaacgttacgctttgggggaaagatggatttttttagtgtgcagaatatcctggtacatataccaataggggcaggcggttatgatctctcatggatcgaagcggtaggcacgatcgccgggttgctgtgtattggccttgccagtctggagaagatcagcaactacttctttggcctgatcaacgtcaccttgtttggcattattttctttcagattcagctgtatgccagcctgctattacaggtgtttttctttgccgcgaatatttacggttggtatgcgtggtcgcgacaaaccagtcagaacgagacggagttgaaaattcgctggttgccattgccgaaggcactcagctggttggcggtttgcgttgtttcgattggtctgatgacggtatttatcaatccggtgtttgcatttttgacccgcgtggcagtcatgatcatgcaagcattaggattacaggttgtgatgcctgaactgcaaccggacgctttcccgttctgggattcatgcatgatggtgttatctatcgtggcaatgattctgatgacgcgtaagtatgtggaaaactggctgttgtgggtgattattaacgtgattagcgtcgttatttttgcacttcagggcgtttacgccatgtctctggagtacatcatcctgacctttattgcgctcaacggcagccggatgtggatcaacagcgcacgtgaaagaggctcacgcgcgctgtcccattaatggtgatgatgtgaatggccagacaccccttcattcaggtggcagtctggcccatgacaaggttgatattccatctgaatggtggcgtgctcaatctgatagtgatccatcaggtagtgttggatctgatccaacaaggcatcgtgatcgtgtggcgggatcacctgcacatgcaacgtcatcaccggcttctcgcctaccatccatacatgtacatggtgcacattgcggacttccgggatttcccggcacatacgacgcttcagttcagcgatatccagcgataccggtgcaccttcaagtaattcattcacgctatctttcaacagtcgccacgcgctacgcagaaccagaagcgacaccagtatcgagagaatggggtcagcaggtgtccagccagtccagataataatcaacgcggcaataatagccccaaccgaacccagcaggtccccgagcacatgcagtgccgctgctcgtacgttgaggtttttctcttcgctgccgtgatgaagtaaccagaaagaaagtatatttgccagcaacccagccacggcaattgccatcatcatgccgccctcgaccggacgcggcgtgcggaagcgttctatcgcctcccagacaatcaaaatggtaattaccacgagggctatggcattcacaaacgccgcgagcgtggtcagtcttagccaaccgaaagtgtggcgaatggtgggaggacgacgtgaaaattgcacggcgagtagggcgaaaagcagggcggcagtatcggtcaacatatgacccgcatcggccagcaatgccagagaaccagaaagaaaaccaccaacgacttctaccagcataaacccggcagtcacgccgaaagcatacaacaagcgacgagcattattatcttctggcaggtgtgaggacgtgtgtgagtgtgagtgcgccatgacgagtcatcccttaattattctcacttaactttatgacatcatactgcttttagaagtgaaaaattaaaagggagagactccgctctcccattattggctattttgcagggttactgcgtggtaccgtcggttttggtatcgacatcattattgatgccatcaccggtttgtacctttttattgatatccggacagcgaccatctttgcacatggtgttcttgtgctcttcatctttggtcattccgtcattgttcattgaagaaccatccgaatgcagcattgtgccgccagaaccggtatttaccccgttattgtcgacgttatttggcgcgacattttcacgggcgtcaggggctacctggcccgcatcagctgcggcgtttgcctggccgttattagtttgcgctccgctatcggcagccagtgcggcaccgctggcaaggcttagagtggcagtcagaaataatgtggccagttttgtcattttcataggatgctcctgttatggtcgttatgtcggataacctcttccaacagtgcatttgcaggtgaatataaggcattggtttaagatttcagccaggttatgaaacgcagcagagaatcttgaaataattaacaaacaaaggagttacagttagaaattgtaggagagatctcgtttttcgcgacaatctggcgtttttcttgctaattccaggattaatccgttcatagtgtaaaaccccgtttacacattctgacggaagatatagattggaagtattgcattcactaagataagtatggcaacactggaacagacatgaattatcagaacgacgatttacgcatcaaagaaatcaaagagttacttcctcctgtcgcattgctggaaaaattccccgctactgaaaatgccgcgaatacggttgcccatgcccgaaaagcgatccataagatcctgaaaggtaatgatgatcgcctgttggttgtgattggcccatgctcaattcatgatcctgtcgcggcaaaagagtatgccactcgcttgctggcgctgcgtgaagagctgaaagatgagctggaaatcgtaatgcgcgtctattttgaaaagccgcgtaccacggtgggctggaaagggctgattaacgatccgcatatggataatagcttccagatcaacgacggtctgcgtatagcccgtaaattgctgcttgatattaacgacagcggtctgccagcggcaggtgagtttctcgatatgatcaccccacaatatctcgctgacctgatgagctggggcgcaattggcgcacgtaccaccgaatcgcaggtgcaccgcgaactggcatcagggctttcttgtccggtcggcttcaaaaatggcaccgacggtacgattaaagtggctatcgatgccattaatgccgccggtgcgccgcactgcttcctgtccgtaacgaaatgggggcattcggcgattgtgaataccagcggtaacggcgattgccatatcattctgcgcggcggtaaagagcctaactacagcgcgaagcacgttgctgaagtgaaagaagggctgaacaaagcaggcctgccagcacaggtgatgatcgatttcagccatgctaactcgtccaaacaattcaaaaagcagatggatgtttgtgctgacgtttgccagcagattgccggtggcgaaaaggccattattggcgtgatggtggaaagccatctggtggaaggcaatcagagcctcgagagcggggagccgctggcctacggtaagagcatcaccgatgcctgcatcggctgggaagataccgatgctctgttacgtcaactggcgaatgcagtaaaagcgcgtcgcgggtaaggtttaattgtcggatgcgccgtcagagtggcgtatccgatgaatcaccacaggcctgataagtcgcgcagcgtcgcatcaggcaatgtgctccattgttagcaacaaaaaagccgactcacttgcagtcggctttctcattttaaacgaatgacgtttacttcgctttaccctggtttgcaaccgccgctgctttcgctgcgatctcgtcagcattacccagataatagcgtttcagcggtttgaaattctcgtcgaactcatacaccagcggcacgccagtcgggatattaagctcaagaatctcttcttcgctcatgttatcaagatatttcaccagcgcacgtaaagagttaccgtgtgcagcgatgatcacgcgctcaccgctcttcatacgcggcagaatagtttcattccagtaagggatcacgcggtcaatggtcagcgccaggctttccgtcagcggcagttctttctcgctcagtttcgcgtaacgcggatcgtgacccggataacgctcatcatctttagtcagttccggcggagtcactgcaaaaccacgacgccactgtttcacctgctcgtcgccatacttttcagcagtttccgctttgttcagaccctgcaacgcaccgtagtgacgttcgttcagtttccaggatttctcaacgggcagccatgcctgatccagttcgtccagcacattccacagggtatggatagcgcgtttcagcacagaagtgtaagcaaagtcaaagctgtaaccttcctctttcagcagcttacctgctgcttttgcttcgcttacgcctttctcagacagatccacgtcgtaccaaccggtgaaacggttttctttgttccactgactttcgccatgacgaaccagaaccagcttagttacagccatatacttactcctcaaatcatcttttaatgataataattctcattatattgccgcgacgaagcaacagcaatgcttacgcataaccatagcgaaaatagtggcgcagtgtaaggttgttgtgaatattgagttgcaaatatgtcggtgtttgctggtgatttgaacaatatgagataaagccctcatgacgagggcttaacattactcagcaataaactgatattccgtcaggctggaatactcttcgccaggacgcaggaagcagtccggttgcggccattcagggtggttcgggctgtccggtagaaactcgctttccagagccagcccttgccagtcggcgtaaggttcggttccccgcgacggtgtgccgccgaggaagttgccggagtagaattgcagagccggagcggtggtgtagaccttcagctgcaatttttcatctgctgaccagacatgcgccgccactttcttgccatcgcctttggcctgtaacaagaatgcgtgatcgtaacctttcactttgcgctgatcgtcgtcggcaagaaactcactggcgatgattttggcgctgcggaaatcaaaagacgttccggcgacagatttcaggccgtcgtgcggaatgccgccttcatcaaccggcagatattcgtccgccagaatctgcaacttgtgattgcgcacgtcagactgctcgccgtcaagattgaaatagacgtgattagtcatattcaccgggcaaggtttatcaactgtggcgcgataagtaatggagatacggttatcgtcggtcagacgatattgcaccgtcgcgccgagattacccgggaagccctgatcaccatcatctgaactcagggcaaacagcacctgacgatcgttctggttcacaatctgccagcgacgtttgtcgaacccttccggcccgccgtgcagctggttaacgccctgacttggcgaaagcgtcacggtttcaccgtcaaaggtataacggctattggcgatacggttggcataacgaccaatagaggcccccagaaacgcggcctgatcctgatagcattccgggctggcacagccgagcagcgcctcgcggacgctgccatcggaaagcggaatacgggcggaaagtaaagtcgcaccccagtccatcagcgtgactaccatccctgcgttgttacgcaaagttaacagtcggtacggctgaccatcgggtgccagtgcgggagtttcgttcagcactgtcctgctccttgtgatggtttacaaacgtaaaaagtctctttaatacctgtttttgcttcatattgttcagcgacagcttgctgtacggcaggcaccagctcttccgggatcagcgcgacgatacagccgccaaatccgccgccggtcatgcgtacgccacctttgtcgccaatcacagctttgacgatttctaccagagtgtcaatttgcggcacggtgatttcgaaatcatcgcgcatagaggcatgagactccgccatcaactcgcccatacgtttcaggtcgccttgctccagcgcgctggcagcttcaacggtgcgggcgttttcagtcagtatatgacgcacgcgttttgccacgatcgggtccagttcatgcgcaacagcgttgaactcttcaatggtgacatcacgcagggctggctgctggaagaaacgcgcaccggtttcgcactgttcacgacgggtgttgtattcgctgccaaccagggtacgtttgaagttactgttgatgatgacgacagccacacctttgggcatggaaactgctttggtccccagtgagcggcaatcgatcagcaaggcatgatctttcttgccgagcgcggaaattagctgatccatgatcccgcagttacagcctacaaactggttttctgcttcctgaccgttaagcgcgatttgtgcgccgtccagcggcagatgataaagctgctgcaatacggttccgaccgcgacttccagtgaagcggaagaacttaacccggcaccctgcggcacattgccgctgatcaccatgtccacgccgccgaagctgttgttacgcagttgcagatgtttcaccacgccacgaacgtagttagcccattgatagttttcatgtgcgacaatgggcgcatcgagggaaaactcgtcgagctgattttcataatcggctgccatcacgcgaactttacggtcatcgcgtggtgcacaactgatcacggtttgataatcaatcgcgcagggcagaacgaaaccgtcgttgtagtcggtgtgttcaccaatcaaattcacgcggccaggcgcctgaatggtgtgagtggcagggtagccaaatgcgttggcaaacagagattgtgttttttctttcagactcatttcttacactccggattcgcgaaaatggatatcgctgactgcgcgcaaacgctctgctgcctgttctgcggtcaggtctcgctgggtctctgccagcatttcataaccaaccataaatttacgtacggtggcggagcgcagcagaggcggataaaagtgcgcgtgcagctgccagtgttgattctcttcgccattaaatggcgcgccgtgccagcccatagagtaggggaaggagcactggaagaggttgtcataacgactggtcagctttttcaacgccagcgccagatcgctgcgctgggcgtcggtcaaatcggtgatccgtaaaacgtgggctttgggcagcagtagcgtttcgaacggccaggcagcccagtaaggcacgacggctaaccagtgttcggtttcgacaacggtacggctaccgtctgccagctcgcgctgaacataatccaccagcattggtgatttctgttcggcaaaatattctttttgcaggcggtcttcgcgctcagcttcgttaggcaggaagctatttgcccaaatctgaccgtgcggatgcgggttagagcagcccatcgccgcgcctttgttttcaaaaacctgcacccatgggtacgttttccccagttctgcggtttgctcctgccaggttttgacgatttccgtcaatgctgcaacgctgagctctggcagcgttttactgtgatccggtgaaaagcagatcacccggctggtgccgcgcgcgctctggcaacgcatcagcggatcgtgactttctggcgcatctggcgtgtcagacatcaaagccgcaaagtcattagtgaaaacgtaagtcccggtgtaatcggggtttttatcgcctgtcacccgcacattacctgcgcagaggaagcaatctggatcgtgcgcaggtaacacctgtttggctggcgtttcctgcgccccctgccaggggcgcttagcgcggtgcggtgaaaccagaatccattgcccggtgagcgggttgtagcggcgatgtggatgatcaacgggattaaattgcgtcatggtcgttccttaatcgggatatccctgtggatggcgtgactgccagtgccaggtgtcctgcgccatttcatcgagtgtgcgcgttacgcgccagttcagttcacggtcggctttgctggcgtccgcccagtaggccggaaggtcgccctcgcgacgcggtgcaaaatgataattaaccggtttgccgcaggctttgctgaaggcattaaccacgtccagcacgctgttgcctacgccagcgccgaggttgtagatgtgtacgcctggcttgttcgccagtttttccatcgccacgacgtgaccgtccgccagatccattacgtggatgtaatcgcgtacgccagtaccatcttcggtcggataatcgttaccaaaaatcgccagcgagtcgcgacggcctacagcaacctgggcgatgtatggcatcaggttattcggaatgccttgcggatcttcgcccatatcgcccgacggatgcgcgccaaccgggttgaagtagcgcagcagggcaatgctccagtccggctgggctttttgcagatcggtgaggatctgttccaccatcagcttgcttttgccgtaagggctttgcggtgtgccggtcgggaagctttcaacgtatggaattttgggctgatcgccataaacggtggcggaggagctaaaaataaagtttttgacgttagcggcgcgcatggcgctaatcaggcgcagagtgccgttgacattgttgtcgtaatattccagcggtttttgtaccgattcgcccacggctttcagcccggcgaagtggatcacggtgtcgatagcgtgatcgtgcaggatctcggtcatcaacgcttcgttacgaatatcgccttcaacaaacgttggatgtttgccgcctaaacgctcgataacaggcagtacgctgcgcttactgttacagaggttatcaagaatgatgacatcatgaccgttttgcagtaattgcacacaggtatgacttccaatgtaaccgctaccaccggtaaccagaactctcataattcgctccattaggcttatggtatgaaataaccatagcataacaaagatgcgaaaagtgtgacatggaataaattagtggaatcgtttacacaagaatttagccgttttttatgcgcgattaagtgattataaaacagagggtttatgaatgattgcgctttttatctgaaaaaagacgcggtttcatgcctgcatgcgtcgaaccgttggccggaaagggcgctaaggccgcctccggcaaggtcagcactaccgactcaatatatttttgtcagcacatagcgatagagtccaccgtccggcacgaactcaagacgatgggtaatacaggcaggcgcatcttcagcgtggtgcgaaacaaacaacaattgcgtttcaccttcgctaatcagcacatcaacaaaacggcggataagctggcgattcagcggatcaagcccctgtagtggttcatcgagaataagcaacgtcggatgtttcaccagtgcgcggacaatcagcgccagacgctgctgtccccaggaaagactatggaacggagcgtcagccgtgcgtttatcaatgccgagaatatccagccactgctgcaccagtttttgctggcgatccgaaacggcctgataaatgccaatcgaatcaaaatagccagaaagaatcacattacgcacggtagtgctgacccggtaatccagatgcaaactactgctgacgtaaccgatatgctttttgatatcccagatggtttcgccgctgccgcgacgtcgtccgaaaagcgtcaaatcgttgctgtaaccttgcggatgatcgccagtaaccaggcttaataacgtcgattttcctgcaccatttggcccgacaatttgccagtgttcgcttggattcacctgccagctaaggttattaagaatggggcgatcgttataagaaaccacgccattgttcagcacaatgcgcggttcgttggcgggtaaggcgtgacgtgctgaaggttcatccggctccggcagttgcacaccttcaagctgttcactatgcgccagttgcgcgacgagtgcttgttggagcagttcctctttagcgccagtttccgctaacgtgcaatccgccagcacgccagcaaactggacaaactccgggatctcatcgaagcgattgagcaccagtaccagagtaataccggactgatgtaacgaggcgagtcgctcagccagctgctgacgtgaggcaacatccaggccatcgaacggctcatcaagaatcaacaagtcaggctccgacatcagcgcctgacacagcagggtttttcgcgtctcgccagtggaaaggtatttaaagcgtcggtcgaggagggcggtaataccgaactgctgcgccagttgcatgcaacgcggtgcatcctttacttcatcctgaatgatctcagccgtagtgcgtccggtgtcatcttcgccagggccgagcatatcggtgttattccgctgccattcgtcgctgacgagtttttgcaattgctcgaaggagagacgagtgatgtgggaaaactggctttgccgttcacctttcaaaagcggaagttcccccgccagcgcgcgggccagggccgatttcccgcttccattcgaaccgacaaacgcccaactatcacccgcgtttaacgttagctgaggcaattgcagcgtttttgtgtcgctaagacgaaacgtgccttgcaaaatttgcaacgatgacattttatatcccattttgtgcagcgattactgacagggatacgtgtttcataacaaattgtcaacacgcttagcacagcgtggcgataatcacgctgtcggcattaaagtaggccgtgacattctgtccttgctgaagagaagtcgcttcatttaccggcactgtggcgcacagtgtttgcccgtccggtagcgccattaatacttcgcactgctctgcgccgcgctcaatatgactaataatacccggtaattggttgtcagcgttttgcgcgaccgcttcgtcctgagtaatgcctacccacggcgcttttagcaatatcaacacttctttgccttcatccagccccagacgcgcgccgctttgtgcggtaattgcgactttcagacgtgtttttccgtcagccagtaagacatcaacatgctgttgaacgtcatcatgatcgcgggcggtgatggtaccgaaccactggttacgggcgctggtttgcagtgaaaaacgtgagatcgcggccagcaggctgttcagcggcagggcgtcatcgtcacttaacacatcaaaggctttttgctggatttgcgccagtaagtcatagagctgaatcagtcgctgaccatagcgggtcagtactgcgccgccgccacctttaccgcctgttgcgcgctcaaccagaatatgctcgcttaactgattcatctcgttaatggcatcccaggcgcttttatagctgataccggcatctttcgctccctggctaatggaaccggaaagcgcaatgtgttttagtagcgaaatgcggcgcgggtcggcgaataatttttgttggagcttaagggtgagaaggatttcggcctgcataacaatgtcctggcaaaagtcttattgtgacggaaaacgaacgccacgcaaagctgaccgcacaaaaggggagtgcttttctgtgcttagcggttagaatagtctcatgactatatctggagttgaccatgttagagttattaaaaagtctggtattcgccgtaatcatggtacctgtcgtgatggccatcatcctgggtctgatttacggtcttggtgaagtattcaacatcttttctggtgttggtaaaaaagaccagcccggacaaaatcattgattccctgaatgcccgcttagtcgggcatttctttttctcaacttcctgcttttccagccgatattttttcttatctacctcacaaaggttagcaataactgctgggaaaattctgagctagccgttatattgtcgcctacataacgttacattaaggggttaccaatggctcgtaaatggttgaacttgtttgccggggcggcactctctttcgctgttgctggcaatacactggcagatgaagggaaaatcacggtgttcgccgccgcatcactgactaacgcaatgcaggacattgctacgcagtataaaaaagaaaaaggcgtggatgtggtttcttctttcgcttcgtcatctactctggcccgtcagattgaagcgggagcgcctgcggatctgtttatctctgccgatcagaaatggatggattatgcggttgataaaaaagcgatcgatacggcttcgcgccagacactgctcggcaatagcctggtcgttgtagcaccgaaagccagcgagcagaaagatttcaccatcgacagcaaaactaactggacttcgctgctgaatggcggtcgcctggcggttggcgatccggaacatgttcccgctggcatttatgcaaaagaagcactgcaaaaactgggcgcatgggatacgctctccccgaaactggctccggcggaagatgttcgtggcgcgctggcgttggtcgaacgcaatgaagcgccgttgggcattgtttacggttctgacgcagttgccagcaaaggggtaaaagtggttgccaccttcccggaagattcacataaaaaagtggaatatccggttgctgttgtggaagggcataacaatgcgacagtgaaagcattttatgattatctgaagggaccgcaggcagcggaaatctttaaacgttacggatttacaatcaagtaatgatactgaccgatccagaatggcaggcagttttattaagcctgaaagtttcttccctggctgtgctgtttagcctgccgtttgggatcttttttgcctggttactggtgcgttgcacgtttccgggcaaagctctgctcgacagcgtactgcatctaccgctggtgttaccgcccgtagtcgtcggttacttattattagtttcgatgggacggcgcggatttatcggtgaacgtctgtatgactggtttggtattaccttcgcctttagctggcgcggcgcggttctcgctgccgccgtcatgtcgtttccgctgatggtgcgggcaattcgtctggcgctggaaggggttgatgtcaaactggaacaggccgcaagaacactgggggccgggcgctggcgcgttttctttactatcacgttaccgctgaccttaccgggcattattgttggtacggtactggcttttgctcgttctctcggtgagtttggtgcaaccatcacctttgtgtcgaacattcctggtgaaacgcgaaccattccttctgccatgtataccctgatccagacccccggcggggaaagtggcgcggcgagactgtgcattatttctattgcactggcgatgatctccctgttgatttcagaatggctggccagaatcagccgtgaacgggcggggcgctaatcatgctggagctgaatttttcccagacgttgggcaaccattgcctgaccattaatgaaacgctgcccgccaatggcatcactgctatctttggcgtctccggtgccggaaaaacttcgctgattaacgccatcagtggactgacgcgcccgcaaaaagggcggattgtcctcaatgggcgggtactaaatgatgccgaaaaagatatctgcctgacgccggaaaagcgtcgcgttggctatgtttttcaggatgcgcggctgttcccgcattacaaagtgcgtggcaatctgcgctacggcatgtcgaaaagtatggtcgatcagttcgataagctggtggcgcttttaggcattgaaccgttgcttgaccgtttaccaggcagcctgtccggaggcgaaaaacagcgcgtggcgattgggcgggctttgctgacggcaccagaattgctgttgctggatgaaccgctggcgtcactggatattccgcgtaaacgcgaactgttgccttatctgcaacgtctgacgcgggaaatcaacatcccgatgttgtatgtcagccattcgctggatgagatcctccatctggcagacagagtgatggtactggaaaacggtcaggtgaaagcctttggcgcgcgggaagaagtctgggggagtagcgtgatgaatccgtggctgccgaaagagcaacaaagtagcattctgaaagtgacggtacttgagcatcatccgcattacgcgatgactgcgctggcgctgggcgatcagcatttgtgggtcaataagctggacgaaccgctgcaagctgcgctacgtatccgcattcaggcttccgatgtttctctggttttacaaccgccgcagcaaaccagcattcgtaacgtattgcgggcaaaagttgttaatagttatgacgacaacggccaggtggaagtggagctggaagtcggcggtaaaacgctgtgggcgcgtatcagcccgtgggccagggatgaactggcgatcaaacctggcctgtggctgtacgcgcaaattaaaagtgtgtcgataaccgcctgattaaatcaggtggctataaatgaactgggcaatgctgtcggtggtgttatcaccaatcacaatgttggcgcgcgcttttaccgcgtcatcggcgttgcccatcgccacgcctgtaccagcggcttccagcatactgatatcattaaagttatcgccgaatgccacgacgttttccatcgaccaaccttgcgcctcaacccatttcgtcaaacgtttacctttgctgttgccgccgcgtgcaatatcaacctgatcgtgccaggaccattcacactccagtcccagttcatgttcgacatgcttaccaaaatgctgcaattgcggcaggtcatcgtgcgtcagggcgaacttccatacggcgttaacttgttgcgccgtttcagccagagaagcgacttgtgtgaaagtcggacgctgttccggcggcagggtttgcgcccagttagatgtgcgaatgacatgcccggtcgggtgctcatagaccattgcatcatcgacatacatcagaccgtgaatgtggtgttcattcagcatctcaatgagttgcagggctttaataacgggcattgggtccgcttccagcacggtttttgcatgataatcatacaaataggtgccattacagcaaatagcaggtgtatccagcgccagcgcctgataaaaaggatgaatagcgacgtgatggcgacctgtgacgatgattaattgatagcctgcttcgcgagcgcgggccagggcttctatcgatgaaggaagcagggtctttttcggggtcaataaggtgccgtctaagtcgagagcaatcacgcgtgtggtcatggcgtattccagattaaggttaagaattttcgtctgcgcgaatggtacaccgataccactatcggacaaaattctgcgttttaattcagcattcaccgccaaaagcgactaattttagctgttacagtcagttgctaaatgcaaaggagcattcatgaagcaaacagtttatatcgccagccctgagagccagcaaattcacgtctggaatctgaatcatgaaggcgcactgacgctgacacaggttgtcgatgtgccggggcaggtgcagccgatggtggtcagcccggacaaacgttatctctatgttggtgttcgccctgagtttcgcgtcctggcgtatcgtatcgccccggacgatggcgcactgacctttgccgcagagtctgcgctgccgggtagtccgacgcatatttccaccgatcaccaggggcagtttgtctttgtaggttcttacaatgcgggtaacgtgagcgtaacgcgtctggaagatggcctgccagtgggcgtcgtcgatgtggtcgaggggctggacggttgccattccgccaatatctcaccggacaaccgtacgctgtgggttccggcattaaagcaggatcgcatttgcctgtttacggtcagcgatgatggtcatctcgtggcgcaggaccctgcggaagtgaccaccgttgaaggggccggcccgcgtcatatggtattccatccaaacgaacaatatgcgtattgcgtcaatgagttaaacagctcagtggatgtctgggaactgaaagatccgcacggtaatatcgaatgtgtccagacgctggatatgatgccggaaaacttctccgacacccgttgggcggctgatattcatatcaccccggatggtcgccatttatacgcctgcgaccgtaccgccagcctgattaccgttttcagcgtttcggaagatggcagcgtgttgagtaaagaaggcttccagccaacggaaacccagccgcgcggcttcaatgttgatcacagcggcaagtatctgattgccgccgggcaaaaatctcaccacatctcggtatacgaaattgttggcgagcaggggctactgcatgaaaaaggccgctatgcggtcgggcagggaccaatgtgggtggtggttaacgcacactaaccgctgatttacccggcgcagtctctcctgcgccggtgtattaacctatctcctgtaacgcgtgtctctggcgttcgacgatattggtccacaaattgtctttatcgtcagtccataaattaatcagcaaggcaaaaaagcgttctgctgctggagaaagtacggcatctttacggcgaattattcccaatgttcgacgtataacgggttccaccaatgggataccaataatcgaagaatagggcgcatgaggcattgccaggccaggaagcgccgaaatccccagtcccgcctccaccagtcctaatgacgtcgaaagatgacgcacttcgtaaaaccagtccagcttccagggcttgtcggctagctgttgttctatcaacagtcggttgccgctggaggagcgtacgccaatcattttgtaacccactaactcctgccattctacaagctgctttttggccaatggatggtcacgccgacaggccagcacgaacggctcgttgaccagtggggtaaaatcaatggatgaatttgtgacgttgttcatgtttatgccaaagtctgattcgttacacagcaccgattccatgcaattattcgtgccttgttccagaatccgcactttaatattgggatacagctcattaaatttaccgattgccagcggtaaaaaataaaatactgcggtcggaatacacgctaacgtcaccataccacgatgataagcattcatatcacgaatattaaaaagcgtttcatcgaatttctttattaattcccgcgcctccgggagcaacctttttcctgcttttgttaacgtaaccttgcgagttgtacgctcaaatagttgaatatgtaaatcttcctccatcttttttattcttcgcgttaatgcaggttgcgtaatattgagtaatttagcggcattgttaaacgaactggactctgccagtatgacaaatgccttcatacttgataattcatgcttcattattactccggaaaatggaagcgacgattttgggtggctggccgttaaaaattttaactgcatttagccaacttaaattaatgaaaaaatgttattaatcgttgagctaaagtcattagagatgctttgcccttaatgtaaccatatcgcaataagttatgtttttaaattgagggcattattatgaaaaaaataccctgcgtgatgatgcgaggtggaacctcgaggggcgcgttcctgttagcggaacatttacccgaagatcaaacgcagcgcgataaaatattgatggcaattatgggttccggtaacgatctggaaattgacggtattggcggcggtaatccactgaccagtaaagtcgccattattagccgttccagcgatccgcgtgctgatgtcgattatctgtttgcgcaggtaatcgttcatgagcaacgtgtcgataccacgcctaactgcggcaatatgctgtctggtgttggggcattcgccattgaaaatggtttgattgcagcgacttcgccagttactcgcgtacgtatccgcaacgtcaatacgggtacgttcatcgaagctgatgtgcaaacgccaaatggtgttgtcgagtacgagggtagcgccagaattgacggcgtaccgggtactgccgcaccggttgcgctcactttcctgaatgccgccggaaccaaaaccggaaaagttttcccgactgataatcagattgattattttgacgatgtcccggtgacctgtatcgatatggcgatgccagtcgtcattattccggctgaatatctgggaaaaacaggttatgaattaccggcggaactggatgccgacaaagcattattagcccgcattgaatctatccgtctacaagcgggtaaagcaatgggcttaggtgatgtcagtaatatggttatccctaaacctgtgcttatttctccagcgcagaaaggcggggcaattaatgtgcgttattttatgccgcattcttgccatcgcgcgctggcgataaccggtgctattgctatttccagtagttgtgcattggaaggcaccgtcacccgacaaatcgtcccttctgtaggatacggcaatatcaatattgaacaccccagtggtgcgctcgacgttcatttaagtaatgaaggtcaggatgccacgacgttacgcgcatctgttattcggacgaccagaaaaatattttccggtgaagtttatcttccctgaaaaaattcgttgtcaggataaggacaatcaataaaggacttctgtatgagtcatacagaaagaacaggattttaaatgaataagaaatcgttatggaagctaattctgatattagcgatcccatgtattattggttttatgccagctccggcaggattaagcgaactggcgtgggtgctttttggtatttacctggcggccattgtggggctggttatcaagcctttcccggaacctgtcgtactgttaattgccgttgctgcctcaatggtggtggtcggtaacttatccgacggtgcgtttaaaaccaccgccgtattaagcggttactcttcaggtaccacctggctggtgttctcggcgtttaccttaagcgccgcatttgtgaccaccggtttaggtaaacgtattgcctatctgctgattggtaaaatcggtaacaccacgctgggtctgggttacgttacggtattcctcgatctggtactggctccggcaacaccgtctaacaccgcgcgtgcgggcggcattgtgttaccgatcatcaacagcgtggcggtggctttggggtccgaaccggaaaaaagtccgcgtcgtgtcggacattacctgatgatgtccatttacatggtcaccaaaaccaccagctatatgttctttaccgcaatggcggggaacattctggcgctgaaaatgatcaacgacattctgcacctgcaaattagctggggtggatgggcgctggcagccggattgccgggcatcattatgctgctggtcaccccgctggtgatttacaccatgtatccaccagaaattaagaaggtggataacaaaaccatcgctaaagcgggccttgccgaactaggaccgatgaaaatccgcgaaaaaatgctgctcggtgtctttgtgctggcgctgctgggctggattttcagtaagtctctgggggttgatgaatccaccgtggcaatcgttgttatggcaaccatgctgctgctgggtatcgttacctgggaagacgtggttaaaaataaaggcggctggaataccttaatctggtacggcggtattatcggcttaagctccttattatcgaaagttaaattcttcgaatggttagctgaagtctttaaaaataacctggcatttgatggtcacggtaacgttgctttcttcgttattattttcctcagcattatcgtgcgttatttcttcgcttccggtagtgcctatatcgttgctatgttaccggtatttgccatgctggcgaacgtctccggcgcaccgttaatgttaaccgcgctggcactgttgttctccaactcctatggcggcatggttactcactatggcggcgcggcaggtccggtcatctttggcgtgggttataacgatattaaatcctggtggttggtcggtgcggtactgacgatattaaccttcctggtgcatatcaccctcggcgtgtggtggtggaatatgctgatcggctggaacatgctgtaaatatactcgtcatacttcaagttgcatgtgctgcgtttgcgttcgctcaccccagtcacttacttatgtaagctcctggggattcactcacttgtcgccttcctgcaactcgaattatttagagtatatccatttattatctttctgcgcacttcacggtgcgcagatatctggagcatttgatgatcaagttatctgaaaaaggcgtgtttctcgccagtaataacgaaataattgccgaagaacatttcaccggcgaaattaaaaaagaagaagccaaaaaaggcactattgcctggtctattctctcttctcataatacgtccggaaatatggataaacttaaaattaagtttgattcattagcctctcacgatattacctttgttggtattgtacagaccgctaaagcgtccggaatggaacgtttcccgctgccgtatgtgctgaccaactgccataactcactctgcgccgtcggcggcaccattaacggtgatgaccatgtttttggtttatcggcagctcagcgttatggcggtatttttgtgcctccgcatattgcggtcatccatcaatatatgcgtgagatgatggcaggcggcggcaaaatgatcctcgggtcagacagccacacccgttacggtgcattagggacaatggcagtcggtgagggcggcggtgagttggtaaaacagctgcttaatgacacctgggatatcgactatccgggagttgttgcggtgcatctgaccggaaaaccagcgccgtatgtggggccgcaggatgtggcgctggctatcatcggtgccgtgttcaaaaacggctacgtcaaaaacaaagtgatggaattcgtaggtcccggtgttgctgcgctctctaccgatttccgtaacagcgttgacgttatgaccactgaaacgacctgtttaagttctgtctggcaaaccgatgaagaagtccataactggctggcgctgcacggtcgcggccaggattactgccagcttaaccctcaaccgatggcgtactacgatggctgcatcagcgttgatttaagcgccatcaaaccaatgattgcgctgccgttccacccgagcaacgtgtatgaaatcgacacactgaaccagaacctgaccgacattctgcgtgagattgaaattgagtccgaacgcgtggcgcacggtaaagccaaactctcgctgctggataaagtggaaaatggtcgcctgaaagtgcagcaggggattatcgcgggctgttctggcggtaactacgaaaacgtcatcgcggcggcgaatgcactgcgcggtcaatcctgtggcaatgacaccttctcgctggcagtttacccgtcatcacagccggtgtttatggatctcgccaaaaaaggtgtggtagcagatttgattggcgcaggcgcaatcatcagaaccgcgttctgcggcccatgctttggcgcgggcgatacgccaatcaacaacggattaagtattcgccacaccacgcgcaacttcccgaaccgcgaaggctctaagccagctaatgggcagatgtcagcggtggcgttgatggacgctcgttctatcgctgcgactgcggcaaacggtggctatttaacctctgccagcgaacttgattgctgggacaacgtgccggagtacgccttcgatgtaacgccgtataaaaaccgtgtttatcagggctttgtgaaaggggcaactcagcaaccgctgatttacggaccgaacattaaagactggccggaattgggtgcgctgactgacaatatcgtcctgaaagtgtgctcgaagatcctcgacgaagtgaccaccaccgacgaactgattccttccggtgaaacctcttcttatcgttcaaatccgattggtctggcggagtttaccctgtcacgccgcgatcccggttatgttggcagaagtaaagcgactgctgagctggaaaatcagcgtctggcggggaatgtcagcgagctgacagaggtgtttgcgcgcattaagcagattgctggtcaggagcatattgatccgctgcaaactgaaattggcagcatggtatatgcggtgaaaccaggcgatggttctgcgcgtgaacaggcggcgagctgccagcgtgtgattggcggtctggcgaatattgccgaagagtacgcgactaaacgctaccgttctaacgtcatcaactgggggatgttaccgctgcagatggcggaagtgccaacctttgaagtgggggattacatttacatccctggcattaaagcggcgctggataatccgggtacgacgtttaaaggttatgtgatccatgaagatgcgccggtaacggaaattacgctctatatggaaagtctgactgctgaagagcgcgagattatcaaggcgggtagtttgattaacttcaataaaaaccgtcagatgtaaaaagcgccatgtgaatgtaggtcgcattcggcacttattgtcggatgcgatgcttgcgcatcttatccgacctacgaatcgcatcgaatctgtaggccagataaggcattttcgcagcatccggcacttattgtcggatgcgatgcttgcgcatcttatccgacctacaaatcgcatcgaaccgtaggccggataaggcgtttacgccgcatccggcaaatagttaattgctcttacttcttcgcctctgcaaccactttactacccacgccgcggttattgtattcccacatgcggttgtagttagtgtcattcagattgcgctgtatttcgtcgttatcatctacgctgccggtattacccgcaaacggacgattagagatcaccgcatcggcccacggtttagccgtgttaaaaccttcgttgatggcgctatcacggatcaccacctgaccgttggtattggcatcaacatccagcgagcggcccagttgcgccacaccatcaccgaaagcattgaaacggctgtttacggcgaggaaaccgtagtaaatgttggacagcgtagccggtgcaaacacatacgcttcttgctgagtacgtgagttcaccacgcggaattcggtgttatcgaacaccactgcgccgcgaccagaaacgatatccacatccccttcaatgtagctgttggtcaccagcgtacgcggctgacgattcgtttccagacggttctgcacaccgctgttggtgacaaagaaggtgttctgacgaccgagaatgttaacgttgttaatctgtacctggtcaccatcagtacgcagtgccaccgccggatggttacctgcatctacgctatcgcccagcgtgttttcgatggtcagattttgcagttgcaggccattgttttgtgaccagaagaccgcagagcagagaacaccgatactgtcgctgcgtttgctctggcagctatcgtacatataccacgctggtttacctggcatatatttgccgcgcgggttgacgtcgtgacgccagtcggcagggctcatgccaccatcaagggaaagcccaatcttcacatcaatcggtttttcacctgtaccgtacagagtaattccacccggagcggcagggacatataccgttccctgatactcaccaggcatcacggcaatatactggcgcttgttggtacgcttgataattgccgcatctaccgccgcctgaatcgtggtatgcgttacaccttgagtgcccgccgggccgacaacaaagtcaggttgcgcaggcagggtaatcggggaaggattccacgctgcagcacctggtgtcagggatgcaaaatagtgttgagcatcgaaattctgcgcttcttttgccgacagaatcgggcgagaagaggtaccaggcgcggtttgatcagaaggacgttgatcgggcggggttgagctacaggcggtcagcgtcacgccaaaagccaatgccagcgccagacgggaaactgaaaatgtgttcacaggttgctccgggctatgaaatagaaaaatgaatccgttgaagcctgcttttttatactaacttgagcgaaacgggaaggtaaaaagacaaaaagttgtttttaatacctttaagtgataccagatggcattgcgccatctggcagagtgattaactaaacatcgcagtaatcgaggcgcttgccagagagtggaaatgaacgttaaacccgaccatcgcgccgctggcaccttcatcgacatcaatacgttctatatccagcgcgtgaacggtaaaaatgtagcgatgagtttcgcctttcggcggtgctgcgccatcgtacccggttttaccaaagtcggtacgcgtctgcaaaacgccgtctggcattgctaccagaccagagccaaacccttgcggtaatacgcgggtatcagcgggtaagttaacaactacccagtgccaccagccggagccggttggcgcatccgggtcgtagcaggtgacaacaaaacttttcgttcccgcaggaacatcatcccacgccagatgcggtgaaatattatcgccatcgtaacccatgccgttaaagacatgacgatgcggcaatttatcgccatcgcgcagatcgttactgatgagtttcatgaaccctcctttcttgtttgcagaaagtgtagccagaaaccctcacgcggacttctcgttattggcaaaaaaatgtttcatcctgtaccgcgcggttaaccgctgcggtcagacgctgcaactgttgcgggagaataatatagggcggcatcaggtaaatcagtttgccaaaaggccggatccagacaccctgttcgacaaagaatttttgcagcgccgccatattcaccggatgagtggtttcgaccacgccaatggcccccagtacgcgcacatcggcaaccatttcggcatcacgggcgggggcaagttgctcgcgcagctgtacttcaatatccgccacctgttgctgccagtcgccagattcgagaatcgccaggctggtgtttgctgccgcgcaggccagcggattgcccataaaagttggcccatgcataaagcaaccggcttcaccgttactgatggtttctgcaacctcgcgcgtggtgagtgtggcggaaagggtcattgtgccgccggttaaggctttaccgaggcacaaaatgtccggcgcgatttctgcatgttcacaggcaaacagtttcccggtacgaccaaatccagtggcgatctcgtcggcaatcagcaagataccttcgcgatcgcatattttgcggattcgttttaaccattccggatggtacatgcgcatcccgcctgcgccctggacaatcggctcaatgatcaccgccgcgatttcatgacgatgcgccgccatcaggcgggcaaagcccaccatatcgcgctcatcccattcgccatccatacggctttgtggggcgggagcaaacaagttttctggcagatagcctttccacaggctgtgcattgagttgtccggatcgcacaccgacatcgcgccaaaggtatcgccatgataaccattgcggaaggtcagaaaacgctggcgcgcttcgcctttggcctgccagtactgcaacgccattttcatcgccacttccaccgctacggagccggagtccgcgagaaaaacgcattccagcggttgcggcgtcattgccaccagtttgcggcatagctcgatggcgggcgcatgggtgataccgccaaacatcacatgcgacatagcatcaatttgcgacttcatcgccgcattaagctgcgggtgattatagccgtggatcgccgcccaccaggacgacataccgtcaaccaggcgtctgccgtcagacaaaattagctcgcaaccttcggcgctcgcgaccggataaaccggcagaggggaggtcatggatgtgtatgggtgccagatatggcgttggtcaaaggcaagatcgtccgttgtcataatcgacttgtaaaccaaattgaaaagatttaggtttacaagtctacaccgaattaacaacaaaaaacacgttttggagaagccccatggctcaccgcccacgctggacattgtcgcaagtcacagaattatttgaaaaaccgttgctggatctgctgtttgaagcgcagcaggtacatcgacagcatttcgatcctcgtcaggtgcaggtcagcacgttgctgtcgattaagaccggagcttgtccggaagattgcaaatactgcccgcaaagctcgcgctacaaaaccgggctggaagccgagcggttgatggaagttgaacaggtgctggagtcggcgcgcaaagcgaaagcggcaggatcgacgcgcttctgtatgggcgcggcgtggaagaatccccacgaacgcgatatgccgtacctggaacaaatggtgcagggggtaaaagcgatggggctggaggcgtgtatgacgctgggcacgttgagtgaatctcaggcgcagcgcctcgcgaacgccgggctggattactacaaccacaacctggacacctcgccggagttttacggcaatatcatcaccacacgcacttatcaggaacgcctcgatacgctggaaaaagtgcgcgatgccgggatcaaagtctgttctggcggcattgtgggcttaggcgaaacggtaaaagatcgcgccggattattgctgcaactggcaaacctgccgacgccgccggaaagcgtgccaatcaacatgctggtgaaggtgaaaggcacgccgcttgccgataacgatgatgtcgatgcctttgattttattcgcaccattgcggtcgcgcggatcatgatgccaacctcttacgtgcgcctttctgccggacgcgagcagatgaacgaacagactcaggcgatgtgctttatggcaggcgcaaactcgattttctacggttgcaaactgctgaccacgccgaatccggaagaagataaagacctgcaactgttccgcaaactggggctaaatccgcagcaaactgccgtgctggcgggcgataacgaacaacagcagcgtctggaacaggcactgatgaccccggacactgacgaatattacaacgcggcagcactatgagctggcaggataaaatcaacgcggccctcgatgcgcggcgtgctgccgatgccctgcgtcgccgttatccagtggcgcaaggagcaggacgctggctggtggcggacgatcgccagtatctgaacttttccagtaacgattatttaggtttaagccatcatccgcaaattatccgtgcctggaagcagagtgcggagcaatttggcgtcggtagcggcggctccggtcacgtcagcggttatagcgtggcacatcaggcgctggaagaagaactggccgagtggctgggctattcgcgggcactgctgtttatctctggttttgccgctaatcaggcggtcattgccgcgatgatggcgaaagaggaccgtattgttgccgaccggcttagccatgcctcattgctggaggctgccagtttaagcccgtcgcagcttcgccgttttgttcataacgatgtcactcatctggcgcgactgcttgcttccccctgtccggggcagcaaatggtggtgacagaaggcgtgttcagcatggacggcgatagtgcgccactggcggaaatccagcaggtaacgcaacagcacaatggctggttgatggtcgatgatgcccacggcacgggcgttatcggggagcaggggcgcggcagctgctggctgcaaaaggtaaaaccagaattgctggtagtgacttttggcaaaggatttggcgtcagcggggcagcggtgctttgctccagtacggtggcggattatctgctgcaattcgcccgccaccttatctacagcaccagtatgccgcccgctcaggcgcaggcattacgtgcgtcgctggcggtcattcgcagtgatgagggtgatgcacggcgcgataaactggcggcactcattacgcgttttcgtgccggagtacaggatttgccgtttacgcttgctgattcatgcagcgccatccagccattgattgtcggtgataacagccgtgcgttacaactggcagaaaaactgcgccagcaaggctgctgggtcacggcgattcgcccgccaaccgtacccgctggtactgcgcgactgcgcttaacgctaaccgctgcgcatgaaatgcaggatatcgaccgtctgctggaggtgctgcatggcaacggttaataaacaagccattgcagcggcatttggtcgggcagccgcacactatgagcaacatgcagatctacagcgccagagtgctgacgccttactggcaatgcttccacagcgtaaatacacccacgtactggacgcgggttgtggacctggctggatgagccgccactggcgggaacgtcacgcgcaggtgacggccttagatctctcgccgccaatgcttgttcaggcacgccagaaggatgccgcagaccattatctggcgggagatatcgaatccctgccgttagcgactgcgacgttcgatcttgcatggagcaatctcgcagtgcagtggtgcggtaatttatccacggcactccgcgagctgtatcgggtggtgcgccccaaaggcgtggtcgcgtttaccacgctggtgcagggatcgttacccgaactgcatcaggcgtggcaggcggtggacgagcgtccgcatgctaatcgctttttaccgccagatgaaatcgaacagtcgctgaacggcgtgcattatcaacatcatattcagcccatcacgctgtggtttgatgatgcgctcagtgccatgcgttcgctgaaaggcatcggtgccacgcatcttcatgaagggcgcgacccgcgaatattaacgcgttcgcagttgcagcgattgcaactggcctggccgcaacagcaggggcgatatcctctgacgtatcatctttttttgggagtgattgctcgtgagtaaacgttattttgtcaccggaacggataccgaagtggggaaaactgtcgccagttgtgcacttttacaagccgcaaaggcagcaggctaccggacggcaggttataaaccggtcgcctctggcagcgaaaagaccccggaaggtttacgcaatagcgacgcgctggcgttacagcgcaacagcagcctgcagctggattacgcaacagtaaatccttacaccttcgcagaacccacttcgccgcacatcatcagcgcgcaagagggcagaccgatagaatcattggtaatgagcgccggattacgcgcgcttgaacaacaggctgactgggtgttagtggaaggtgctggcggctggtttacgccgctttctgacactttcacttttgcagattgggtaacacaggaacaactgccggtgatactggtagttggtgtgaaactcggctgtattaatcacgcgatgttgactgcacaggtaatacaacacgccggactgactctggcgggttgggtggcgaacgatgttacgcctccgggaaaacgtcacgctgaatatatgaccacgctcacccgcatgattcccgcgccgctgctgggagagatcccctggcttgcagaaaatccagaaaatgcggcaaccggaaagtacataaaccttgccttgttgtagccattctgtatttggttaaattgcgagcgagatcgcgtcttcgattgactgcaatttaaccaattaaattctaaaataatcacgaaaaaaattttacttccgcctcatgcggcgaatgtgggaattgcccaggcggcgggggataggggctgcagacagttatccactattcctgtggataaccatgtgtattagagttagaaaacacgaggcaagcgagagaatacgcggcttgcacgcgaattggcgttaaagacggctcaaagaaatatcttttattttttaactggttagataaatgcaatggcagtcactgaacaggcatctcttgccataaaactgtcatcactcatcttgacaaatgttaaaaaagccgttgctttggggataacccggtaaggccggagttttatctcgccacagagtaaattttgctcatgattgacagcggagtttacgctgtatcagaaatattatggtgatgaactgtttttttatccagtataatttgttggcataattaagtacgacgagtaaaattacatacctgcccgcccaactccttcaggtagcgactcatgagtaaaccgttcaaactgaattccgcttttaaaccttctggcgatcagccagaggcgattcgacgtctcgaagaggggctggaagatggcctggcgcaccagacgttacttggcgtgactggctcagggaaaaccttcaccattgccaatgtcattgctgaccttcagcgcccaaccatggtacttgcgcccaacaaaacgctggcggcccagctgtatggcgaaatgaaagagttcttcccggaaaacgcggtggaatatttcgtttcctactacgactactatcagccggaagcctatgtaccgagttccgacactttcattgagaaagatgcctcggttaacgaacatattgagcagatgcgtttgtccgccaccaaagcgatgctggagcggcgtgatgtggttgtggtggcgtctgtttccgcgatttatggtctgggcgatcctgatttatatctcaagatgatgctccatctcacggtcggtatgattatcgatcagcgcgcgattctgcgccgactggcggagctgcaatacgctcgtaatgatcaagcattccagcgtggtactttccgcgttcgtggcgaggtgatagatatcttcccggcagaatcggatgacattgcacttcgcgtggaactgtttgacgaggaagtggaacgattgtcgttatttgacccgctgaccgggcagattgtttccactattccacgttttaccatctacccgaaaacgcactacgtcacaccgcgcgagcgcatcgtacaggcgatggaggagatcaaagaagagctggccgccagacgcaaagtgctgttggaaaacaacaaactgctggaagagcagcggctgacccagcgtacccagtttgatctggagatgatgaacgagctgggctactgttcggggattgaaaactactcgcgcttcctctccggtcgtggaccgggtgagccaccgccgacgctgtttgattacctgcctgccgatgggctgctggtcgtcgatgaatctcacgtcaccattccacaaattggcggcatgtatcgcggtgaccgggcgcgtaaagagacactggtggagtacggcttccgcctgccatcagcgctggataaccgtccgcttaagtttgaagagttcgaagcattagcgccgcaaaccatctatgtttcggcgacgccgggtaattacgagctggaaaaatccggcggcgatgtggtggatcaggtggtgcgtccaaccggattgcttgacccgattatcgaagtgcggccggtggcgacacaggttgatgatcttctttcggagattcgtcagcgagcggcaattaacgaacgcgtactggtcaccacactgaccaagcggatggcggaagatcttaccgaatatctcgaagaacatggcgagcgcgtgcgttatcttcactcagatatcgacaccgtcgaacgtatggagattatccgcgacttgcgtctgggtgagttcgacgtgctggtagggatcaacttactgcgcgaaggtctggatatgccggaagtgtcgctggtggcgatcctcgacgctgacaaagaaggcttcctgcgttccgaacgttcgttgatccagaccattggtcgtgcggcacgtaacgttaacggtaaagcgattctctacggcgataagatcaccccatcaatggcgaaagcgattggcgaaaccgaacgtcgccgtgagaaacagcagaagtacaacgaggaacacggaattacgccgcaaggcttgaacaagaaagtggtcgatatcctggcgctggggcagaacattgccaaaaccaaagcgaagggcagaggaaaatcgcgcccgattgttgagccggataatgtgccgatggatatgtcgcctaaagcgttgcagcagaaaatccatgagctggaagggttgatgatgcaacacgcgcagaatctggagttcgaagaagcggcgcaaattcgtgaccagttgcatcagctgcgtgagctgtttatcgcggcatcgtaacaggatagcgaagaagactgatgacaaacggaaaacagcctgatgcgctacgcttatcaggcctacattttctccgcaatatattgaatttgcgcggtttgtaggccggataaggcgttcacgccgcatccggcataaacaacgcgcactttgtcttcaataggaagccggaattttccttcggatttccgttaacctaaagcctgtaacgccttttccagcgcgttatgtaacaactggcggtcatgacgatacggaatatcgctggcctccagtacctcctggatcacaatccgctctttcaccgccgagacatccacttttggcccgacgatgaccgcatcaatgacctttttaccaacatactgctccataattgccagcttgctttccagcttcaaattagccgcaggtaaactcaactcacgccccagattgccgatataaaccatcggcgctggcgtgcggcgtaatgcctgggcgatttccttcagcagcagaattggcatcaggctggtataaaaactgccaggcccaataatgatgagatccgcttcattgatagcgtgaaccgcctcacgcgttgcgggtacattaggcgttaacaataactcttgaatcggcgtagttaactggtcgatattgacctcgccgtaaacttcatgcccctgatcgtcaatcgccatcagatcaacaggatgctctgacattggaatcaaatgcgtatccactttcagcagattacgaattaaattgatggcttccagaggccgcacgctaaggtgatccagcgcctttaacatcaagtttccgagattatgaccggaaagttcgccattgccaccaaaacggtattcaaacatcgcggaggcgacgctcggttccgttatcagctggttgaggcagttgcgcatatcgccccaggcaatgccgccttctgaacggcgaatacgccccgtcgagccaccattatcggtggtggtgacgatacccgttaaacgagaacccaaagacgaaagtgatgagagaacgcgtcccagtccatgccctccgccgagagcaacgacacgatcaagatcagccagcgtacgattgcgcatatagtttcctggagtcagattatccgcgctacagtagcgcaaattgcggggaaacagcaattaacctgccaatattgaggatacaaactattttcttctacctctaaaggacgatgcacgctatgcctccctgatgatgtatatcaaagtaaaaccgccattttcccttattctgtagcgaaatagcacgatcatgacgctatatacatgattacatagcgaaagtgtggatggtaaaaatctcatttacacgctagtatcggcataaccactaaacactctagcctctgcacctgggtcaactgatacggtgctttggccgtgacaatgctcgtaaagattgccaccagggcgaaggaagaaatgacttcgcctcccgtatctggaaaggtgtacatggcttcacaactgactgatgcatttgcgcgtaagttttactacttgcgcctgtcgattaccgatgtgtgtaactttcgttgcacctactgcctgccggatggctacaaaccgagcggcgtcaccaataaaggctttcttaccgtcgatgaaattcgccgggttacgcgcgccttcgccagtctgggcaccgaaaaagtgcgcctgacaggaggagagccgtctttacgccgcgactttaccgatatcatcgccgctgtgcgggaaaacgacgctatccgccagattgcggtcacaaccaatggttaccgtctggaacgcgatgtggcgagctggcgcgatgcgggacttactggcattaacgtcagtgtcgacagtctggacgcccgccagtttcacgctattaccgggcaggataaattcaaccaggtcatggcagggattgatgctgcatttgaggccggttttgagaaggtcaaagtcaataccgtgctgatgcgtgatgttaatcatcaccagctcgacacctttctgaactggatccagcatcgccctatccagctgcgtttcatcgaactgatggaaacgggcgagggcagcgagctcttccgtaagcatcacatctctggtcaggttctgcgtgacgagctactgcgtcgcggctggatccaccaattacgtcaacgcagcgacggtcccgcgcaagtcttttgccatccagattacgccggagagattggccttatcatgccgtatgaaaaagacttctgcgccacttgcaaccgcctgcgcgtttcctccattggtaaactccatctctgcctgtttggtgaaggcggcgttaacctgcgcgatctgctggaagacgatacccagcaacaggcgctggaagcgcgtatttcagcggcgctgcgggagaagaaacagacccatttcctgcatcaaaacaacaccggtattacgcaaaacttatcgtacattggcggctaaaacgtcaaaaggagagatcagatgagtcaggtaagcactgaatttatcccgacccgtattgctattcttacggtttctaatcgtcgcggtgaagaagacgatacctccggtcactatctgcgcgattcggcgcaagaagcgggccatcacgttgtcgataaagccattgtgaaagaaaaccgctacgctattcgcgctcaggtatctgcgtggatcgccagcgacgatgtacaagtggtattgattacgggtggtactggcctgacggaaggtgatcaggctcccgaagcattgctgccgttgttcgaccgtgaagttgaaggttttggtgaagtgttccggatgttgtcgtttgaagagattggcacttccacgttgcaatctcgtgcggtagcgggcgtcgccaacaaaacgctgattttcgccatgccgggttcgaccaaagcgtgccgtaccgcatgggaaaatatcatcgcgccgcagctggatgcccgtacgcgtccgtgtaatttccatccacatttgaagaaataagtatgtcgcaactgacccatatcaacgccgctggcgaagcgcacatggtggatgtctccgccaaagcggaaaccgtgcgtgaagcgcgggcggaagcctttgtcaccatgcgcagcgagacgctggcgatgattattgatggtcgccaccacaaaggcgacgtatttgccactgcgcgtattgccggtattcaggcggcaaaacgcacctgggatctgatcccgctctgtcatccgctgatgctcagcaaagttgaagtcaatttacaggccgagccggagcacaatcgggtgcgtatagaaaccttatgccgcctgaccgggaaaaccggtgtcgaaatggaagcattaaccgcggcctccgtggcggcgctgaccatttatgacatgtgcaaagcggtgcaaaaagatatggtgattggtccggtacgtttgctggcgaagagcggcggcaagtcgggtgactttaaggtggaagcggatgattaaagttctttttttcgcccaggtgcgcgagttggtgggaacagatgcaaccgaagtggctgcggatttcccaactgttgaagcgttacgccagcacatggctgcgcagagcgatcgctgggcgctggcgctggaagatggcaaattgctggctgccgtcaaccagacgctggtgagttttgaccatccgctgactgacggcgacgaagtggctttcttcccgccggtaaccggaggttaagatggcagaaaccaaaattgttgtcggcccgcagccattcagcgtaggagaagagtatccgtggctggcggagcgtgatgaagacggtgcggtagtcacctttaccggtaaggtgcgcaaccataaccttggcgacagcgtcaaagcattaaccctcgaacactatccggggatgactgaaaaagcactggcagaaattgtcgatgaagcgcgtaaccgctggccgctggggcgcgtcacggtgattcaccgcatcggggaattatggccgggcgatgaaatcgtttttgtcggtgtcaccagtgagcaccgcagcagtgcgtttgaagccgggcagtttattatggattatctcaaaacccgcgcaccgttctggaagcgcgaagccacgccggaaggcgaccgctgggttgaagctcgggagagcgatcagcaggcggcaaaacgctggtagttttttgttagccggataaggcaccgctgcgtccggcaatttcaccgctcagtacatgcgtttacgctgcgtcgatgcacagcctcctcatttgcagtatccttaagatattccttatatcttcaggagatcgtcatggacagattcccacgttctgattcaatcgtacaatcccgggctggcttgcaaacttatatggcgcaagtctatggctggatgaccgttggcttgttgctgaccgcatttgttgcctggtatgcggctaattccgcggccgtgatggagctgttgttcactaaccgtgtctttttaatcggtctgatcatcgcgcaattagcattggttattgtgttatcagcgatgattcaaaagctgagcgcaggtgtaacgacgatgctctttatgctttattcggcgctgacgggtcttacgctttccagtatattcattgtctataccgctgcttctatcgccagtactttcgtcgttactgccgggatgttcggcgcaatgagcctgtacggttacaccacgaagcgcgatttaagtggctttggcaatatgctgtttatggcgttaatcggcattgtgctggcatcgctggtcaacttctggctgaaaagcgaagcgttgatgtgggcagtcacctacatcggcgtgattgtctttgtcggattgacggcgtatgacacccagaaactgaaaaatatgggtgagcagatagatacccgcgacacgtcgaacctgcgcaaatattccattcttggcgcgttaaccttgtatctggacttcatcaacctgttcctgatgttgctgcggatcttcggcaaccgccgttaattctttttcaccatcactatcccggccatgtgtcgggatttttttcttactaaaaacgacacttaacaagtaccaggtataaaatacgccttatggccgagcggaagtgttttccgtatccataaatacaaaagtattttgtatgcgtggttttaaatttattgatggtgaatattaatattttttctaaggacaactaaaagaatggaatcatactcgaaaaacagcaataaattagattttcagcacgaggccaggatattaaacggtatatggctcattaccgctttaggtttggtggcaaccgcaggactggcctggggagctaagtatctcgaaattacggcaaccaaatatgattcactaccaatgtatgtcgccatagggttattattactttgtatgtatggcttaagtaaggatatcaacaagataaatgccgccatcgcaggcgtaatatatctgtttttactctctttggtggcgattgtcgttgcaagtttagttcctgtatatgccattatcatcgtgtttagcactgcgggcgcgatgtttttaatcagtatgctggccggtttattatttaatgttgatcctggttctcaccgttttatcattatgatgacgttgacagggttggccctggtaatcatcgtgaatgcggcattaatgagtgaacggcccatttgggtaataagttgcttaatgattgtgttatggtcaggcattatctcgcatggacgaaataagctccttgaattggcggggaaatgccatagtgaagagttgtggagtccggttcgttgcgcttttacaggtgcattaacactctattactattttatcggcttctttgggatacttgccgcgatagctataacgcttgtctggcaaaggcatacgcgtttttttcattagccgtaaatgcacatactaaagaacttaactaaacttcacatcgccgcttcatttttcgcccgtagcttcttcgcctggctttccagcaacaggtaacagatcagcgccagcagcagtgggataaagtaatacagcacacggtaagcgagtagggcggcgataattgtacctttggaggtatgctccccagccagtagtgcgataaacaccgcttccagcacaccgatccccgccggaatatgcacgatgacgccagcaatactactaaccagtaacacgcccagtacaaagaaatagttcacgctttgaccaagtaacagccagataatcgcccccattaccatccagttaacgctggaaatcagcatctgagcgagggcgaatttccatgaaggcagcaccagcttttgccctttgatggtcatatggcggtgcttcgcgaaagcgcaaaaccacaaataaaccgcgataatcatcagtaagccaatgccgagaatacgcagcgtagtttgatcgacataccagtgatccggcaactccaccacgcctgcggtaaagataatccctgccagtaaaatgtagcccagccagttggtggtaatactgagcgagaaaatccgcgtaatagtgctaccgggcaaccccagacgagagtacaaacgatagcgcataccaatgccgccgacccaggtactgagcgtcaggttgaaggcgtagcagataaacgacaccagcatcacctggcgcttcgccagtttgtgaccgcagtaaaagcgggcgagcaggtcatagcagccgtaaatcagatagctgacgaccaccagcccgaccgcactaagcagcgcaacgcgattgtagtcgcggatgaccttccagacctcttcccagtccacttttttggcgtagaccaccagcaacacaatcaccgcgataaaaaacagccaggtgaggatcttctttgctaagcgccagcgcgggtgtgatttactcatcagggttttacccccgtgttttcagtttctacccgatcctgcgtttccattgtcggttgtgcgggcggatcaacctgcgccagacgtggcgtgtgtgccggaagccagccaaccagcgccgggaagtggcgtaaaaagtggaacgccagcacgcttttggtcaggttccaccaggtgcgtttgggcagcatggtttcatccacctgctgacaatctgcggcgataatgccgttcagattatcgcgcagcgtctggttaaaattacgatcgtggatgatgacatttgcttcgagattcagtgacaaactgagcggatcgagattactggaccctactgtcgcccagtgatcgtccatcaatgctactttgccgtggagcgggcggcggcggtactcaaacacctgaacgccgcctttaaccagatagttatacagcaagcgcgcgccgactctgacaatcggcatatccggttcgccctgaatgatcagtttgatccgcaccccgcggcgtgccgctttacgcaaggcgtgtaaaaatcgatagccggggaagaagtaggcgttggcgataatgacttcccgccgcgcctgagtgagcattttcagatagtggcgttctatatcatcgcggtgttcttcgttatcgcgccagaccagcaatacctgcgcttctcccggctggcgattttcttccgctttgtgatgacgtcgccaccagcgtcgtgccgcgctctgtccaggcaggttttccagctcaaactggagaatatcttcgacaatcggcccttcaaggcgtaccgcgtaatcctgtttagcctctggaccgtagctggacatatgctcggcggagtaattcagcccgccaataaaggcgatacgcgcgtcgatcaccacaattttgcgatgcatccggcgaaacacattggtgcgcataccaaaaaggcgagggcggggatcgtagtagcgaaataccacgccagctgccgtcagttcattgacaaactcatcgctgagatccggcgaaccgtagccatccagcaagacttccgctttaaccccgcgttgcgctgctgccagtagtgccgcatgcagctgtttgccgacgtcatcctcaaaccagataaacgtttcaagaatgatgcgttcttgtgcctcgccaatcgccttaaacaccgcgggataatattgctcgccgttttccagcaactcgatcttattgccttcacgccagctacatttcataaatgaatctccgcacttaaaggggcatgatcagaaaggtgtcgccatgtctgcagcggcaacgcggttggcgcgctggcgctggcatttttgacgtagatcctgtccagacgtagtagaggaaattgcaccggaaacgtgcgcgccgggcgtccgtgggcgcgggtaaatatctcatccagtccggcctgcacttttaacggatgattagctttttgccgccagtcattgaaatcacccgccaccaataccggttcgccgtccggtagctcattcacccattcggcgagcatcgcaagctgcgcctgacggtgcgcctcacgcaggcccagatgtacgcacatcacatgaatcgcttttccggtcatcggcggcacaatgcggcagtagagcacgccgcgcttttccgcaccatcgaccgaaacatcgcgattctcataatgttcaatgggataacgcgacagtacggcgttgccgtgatgcccttccgggtatacggcattgcgaccgtaggcaaaatcgctccacatagtgtcggcgagaaactcgtagtgcgaggtatcgggccagttttccacatgcagcggatgaacttcgtgcgcgcccatcacttcctgcaggcaaacaatatcggcgctgacggtacgcacggcgtcgcgaagttccggcaaaatgaagcgtcggttaaacgcggtaaagcctttgtgaatattgatggtgagcaccttgaacgaaaattgttgtgtttgatcgggcataattttcctgtctttgcctcttatctcattgaaatagtgtagtcggcgtcacaaaaaggtgcggtcttacggaattttccgtaaagttcggtactctgagtaagtagagataaattcttcaggagagaagccatgaagtggcaacaacgtgttcgtgtcgcaacgggtctaagttgctggcagattatgttgcatttactggtagtggcgctgctggtggtgggctggatgagtaagactctggttcacgtcggcgtgggattatgcgcactgtattgtgtcacggtagtgatgatgctggtgtttcagcgccaccccgagcaacgctggcgtgaggtggcagacgtgctggaagagctgaccacgacctggtattttggcgcagcgctgattgtgctgtggctgttgtcccgcgttctggaaaacaactttttgctggcaattgcagggctggcaatccttgccggcccggcggtagtgtctttgctggcgaaagataagaagttacatcaccttacgtctaaacatcgcgtacgccgctgaccctgtcgtggccgttatcaccagtagcggccacaaactattccacacaatatccagactcgcatccttcaaataaatctgcttggtaatgtccgtaaagtggcgaatagggttaatccacgtcaggttttgcagccataccggcatgttttccaccggagaaacgtaaccggaaaggagaatggcgggcatcataaagacaaacacgccgataaacgcctgctgttgtgttgaacagagtgatgaaatcaacagaccgaatcccaccagcgataaaccataaatcaccatcgtaaagtagaacagcgccagcgatccggcgaaggggatttgatacgcccagataccaatcgccagcacaatggtggcctggaaggtggcgacaattaacgccggtacggctttgccgatgaagatctgccaggtggtgagcggcgaaaccagtagctgatcgagcgtaccttgttcacgttcgcgggcgacggaaagtgaagtgacgatcattacgccgatagtggtgatcatggcgatcagtgacggcaccacaaaccatttgtagtcgagattcgggttataccagttgcgtaccaccagctcgctgttgttaggtttcggttttccttccagcagctcctgctgataatttttgacgatctgttgcaggtagttggcggcaatttgcgcactgttggagttacgcccgtcgaggatcaactgcaaaggcgcggtctggaaggtatccagtttgcgcgagaagtcagccgggaaacgcaccagtagtaacgccttttgtgtgtcgatggttgggcggatctcctgtgggcttttcagcagcagcacatgagtaaaggcgctggcgcgggcaaaacgttgggtcagctccaccgaatgctcgccgttatcttcatcgtagatggcgatggtggcgttagtcacttccagcgtggcggcgaacgggaacaggatcacctgaattagcacgggtaaaatcagaatcgcgcgggtttgcggttcgcgcagcaacgactgcaactctttgcggattaacgtccataagcgatgaaacatgctcttctccctaatccagccgacgtttggttttcagccacgtcaggccgataaacatcaccgccgaagcgatcaaaaacagcacgtttaccaccagcaccactggaatattcccggcgaggaacaggctttgcagggtgctgacgaaataacgagcgggaataatgtacgtcaccgcgcggatcaccgcgggcatactgtcgatctgaaaaataaagccggaaagcataatcgacggcagaaaagcggcgttcagggcgacctgagcggcattgaactggttgcgggtaatcgtggaaatcagcagccccatccccagggtactgagtaaaaacaggctggagataaaaaacagaatcagcagcgacccgcgatacggcacgccgagaataaacactgacaccagcatacacagcaacatcgccagcatcccgagaaagtaataagggatcagcttacacagcagcagttccgtgcgggtaatctccgtagagagcagagcctccatggtgccgcgttcccattctcgcgccaccaccagcgaggtgagaatcgcgccgatgaccgtcatgataatggtcaccgcaccggggataatgaagtgctggctaatcgccgccgggttaaaccagtagcgggtttgtacatcaataagcggttcaaaagtctgcccgttgtcctccgctcgctgcatttgccagatctgccagatcccttcgacatacccctgtacaaagttagcggtattcggctcactgccgtcggtgatcacctgaatcggtgcggtggcgttggcgcgctccatctgttccgcaaaatccaccggaataaccaccagaccgcgaattttccccgcctgcattttggcgatcagttcctgacggttatcgctgatggtggcgtcgatgtagggcgaaccggtcatggtgtgggtgaaatccagcgccgcttcgctacgctgttccagtaaaatcccgacccgcagcttgctggagtcgaggttaatgccgtaaccaaaaataaacagcagtagcagcgggatcactaccgcaatcagccagctactcggatcgcgaacgatctgccgcgtctctttaacgcacagcgcccgtacgcgacgccaggacaggatcgggttactcattgctatgctccttatcccagtcgtggatcaactgaataaaggcttgctccatggtgggatcgggttgctcatcgttagccgactgtgctttcaaatcgtccggcgtgccgctggcgattaatttcccgcggtacaccaggccgatgcggtcgcaatattccgcttcatccataaagtgggtggtgaccatcaccgtgacgcctttctctaccatgctgttgatgtgcagccaaaattcacggcgggtgagggggtcaacgccggaagtcggttcgtcgagaaacagaatgtccggttcatgcatcagcgaacaggccagcgccagccgctgtttaaaacctaatggcagttcatcggtggcgtgggaggcgatacttttcaggccgaacgcctcgctcatgcgggagattttttcgttctgcgcccgaccgcgtaagccatacacaccagagaaaaagcgtaaattctgttcgaccgtcaggttaccgtagagcgaaaatttttgcgccatatagccgagatgctggcgcgctttaccggaactctctttcagatccatccccagcaccagcgcctggccggaagtcggcaccagcaaaccgcacatcatcttaaaggtggtcgatttacccgcgccgtttggccccagcaaaccaaaaatctccccacgtttaacggcaaagttgacgtgatcggtggcggcaaaatccccaaatttcttggtcagttctttcgcttcgatcaccgtctcgccgggtgtgccttctaccgtatgtaatattgcgcccagcggcgattccgaggttccggcaccgcccagcaaatcaataaacgcatcttcaaaacgcggcgtagtttcgttgatgttgatttccggcatcccgtcggcatggcgaatatcgtctggtgtggcctcttttttgaggatcagacgtaccgatttcccctgaatcatgccgtcgctgacctgcggcagtttcaaggcgcgttgcaacagtttgcggttgccctcgtgtggactggtcatcagaaagctgcgtccggccatggtttgtgtcagggcttttggttctccctgatacagcaactcgccttcgttcatcagtaacacgtcacggcactgctcggcttcgtcgagatacgaggtactccagaggattaacatcccttcgcccgccagctcatgcaccatctgccacagttcgcgccgtgagatagggtcaacgccgacgccgggttcatcgagcagcaacactttcggttcgcccaccagggtacaggccaggccgagtttttgtttcatcccaccggagagcttgcccgccaggcgtccggtaaacggcccaagagacgtaaactccagcaggcgagcaaaagtttgcttacgtgcctcgccggtgacgctgcgcaaatccgcgtacagattgaggttctccatcaccgtgagatcttcatacagaccaaatttctgcggcatataaccgagcacggcgtgcagcgcgccgtcgtttttgatcggaccaaagccaatcaccgtggcactgccgctgtcgggtttcagtaatcccgccaacatccgcatcagcgtggttttacctgcaccgtccggccccaccaaccccgtcacataaccggcgtgaatggtacaatcgagcggcgcgacggcgggcttgtccatgcccggaaagcgtttttccaggccgttcagcgtgataacggcatcattcatgtcctgcctcgtcaccgaattgtaccgtcactggcattccctggcgtaacgcatcatcggcgtcggtcaccacaatacgcaggcgatagacgaggtcggtacgcagatccggcgtttcgacggttttcggggtaaattcagcagtcggcgaaacgaaaccaatctgcccgtgatacggcttgtccgggcgaccatcggtataaagcagcactttgcgccccggctgggcctggtcaagattacgttcatcaacataagcgcgcacccacaccggacgcgttagtgaaacggtaaacaccgtgccaccttcattgaggaccgtgcctggctccaccgcgcgcgttaacagcgtgccatcagacggggctatcaacgttgagtcctgtaaattcaactccgcctgcgccagttgcgcctgcgcctgttcgaggctggctttcgcctgagcgatgtcctgttcacggttaccggaacggtactgacgcaatttatcctgtgctgatttcagcgttgcctgcgcctggtcgcgcgaggagcgggcattttccaggtcatttgccgaaatagtgcggcttttccacaacccttgctggcggttatagaagttctgcgcatagtcataggcggcttgcgcctgtttcaccgctgcggcggcctgagcgatttcttcatcgcgatacccggcaagcatcaggtcatactgcgcctgtgccaccgaaacacccgctttcgcctgcatcagggcaatctcatacggcttgtgatccagttcgcccagcacctggcccgctttgatagcatcaccttcgtccaccgccagcgattcaacgcgccccccaacacggaaactaagatttaccgtacgaatatccacgttgccatacagcgtcaggccgttatcctggcggctttgataccaccagtagcctccggcaaccacggcggcaagtaccactaccgccaatccgatcacgacaggttttttcatcactacaaactcctttgcgataatccttgcaaaatcaggtcgatatgacaggtcaccgtctggttgatcagttcggtcttttcttcatcgaacgcggtccagccggtacgtaacagaattgtttctttgccaagacggaacgccagaatctcaccaatcaacgcatgggtatgaaggatcatgcgggtgtcattggcgtcgcagccggtccaggcggcaatcaggcgtgtcaggtggctgtgtagcggactaatcacctgttcgtgcaccaggtggtaggctgccgtgggagagagctgctcacgggagataaacttgctgaggttgacggtgtcatcctgggtgagcagcttaatcatgttcctgcaggcgcgaaggatcagttcacggatggcagcccgatcaggctgtggttgcgcgaacaagcgttcggcttcctcggcatgcggacggaactgctcgccaataaaatcggcaatccactgggcgcaggcgaggtacaaatcttctttcgaaccgaagtagtaggtgatggcagcgatattctgcccggcctgggcggctatctcgcgagtggtggcgttcattccatattcaccaaactgcgccagtgcggcagcaatcagctgttttttcgcctgttcacccttgattgtcatggcaggattattcatcgcacagtccattcttaatcaaatgattgattaagattatgactccataggggagttgtccagtatggctaagaattttagcaacgccagtcacagggataatttatgcgctgcgtcacaaaaactgctacactccgctccctcatgacattgtggtttttgtcattttccttttcagtatctccctgaaaactacaccggtaacggtcggggcggttcggagtagttatgtctttcgattctttgggtttaagccctgatatcctgcgcgccgttgccgagcagggttaccgtgaacccacccctattcagcagcaggcgatccctgcggtgctggaaggccgcgacctgatggctagcgcccagaccggcaccggcaaaacagcgggctttacgctgccgctgttgcaacacctgatcactcgccagccgcacgccaaagggcgtcgtccggtacgtgcgctcattcttaccccgacccgtgaactggcggcgcagattggcgaaaacgtccgtgattacagcaaatacctgaacattcgttcgctggtggtgtttggtggtgtgagtattaacccgcagatgatgaaactgcgtggcggcgttgatgtgctggtggcaaccccgggacgtttgctggacctggaacatcagaatgcagtgaagctggatcaggttgaaatcctcgtcctcgatgaagctgaccgcatgctcgacatgggctttatccacgatatccgtcgcgtgttaacaaaactacctgcgaagcgccagaacctgttattctccgcgaccttctctgacgatattaaagccctggcggaaaaactgttgcacaacccgctggaaatcgaagtggcacgccgcaataccgcgtctgatcaggtgacccagcacgttcactttgtcgataagaaacgcaaacgcgaattgctgtcgcacatgattgggaaagggaactggcagcaggtgctggtgtttacccgtaccaaacacggcgctaaccatctggctgaacagctcaataaagatggcatccgtagtgcggcgatccacggcaataaatcgcaaggtgcgcgtactcgtgcgctggctgattttaaatcgggcgatattcgtgtactggtggcaactgacatcgctgcgcgcggcctggatattgaagagctgccgcacgtcgtcaactatgaactgccaaacgtacctgaagattatgtccaccgtatcgggcgtaccggtcgtgcggctgctaccggtgaagcgttgtcgctggtgtgtgttgatgaacacaaactgctgcgtgatatcgaaaaactgctgaaaaaagagatcccgcgcattgcgattccgggctatgagccggacccgtcaatcaaagccgaaccgatccagaacggtcgccagcaacgtggcggcggcggtcgtgggcaaggtggtggtcgcggtcaacagcaaccacgccgtggggaaggtggcgcaaaatctgcaagcgcgaaacctgcagaaaaaccgtctcgccgcctcggcgatgccaaaccggcaggcgaacaacaacgtcgccgccgtccgcgtaaacctgccgctgcgcagtaatcttttatgccgggctatgcccggcatcaggctgatgaacaaacgcaaaactgcctgatgcgctacgcttatcaggcctacgtgaactctgcaatatattgaatttgcatgcttttgtaggccggataaggcgtttacgccgcatccggcatttcacaacaagcacttgtcagcaatttgagaacacgggaaaaaatttatctgttttaccgcccataagccaccgagacgttacttctctatagccaattgttcgcgcaactccattaaaaggtagcccagtcgattcttgcccttaccatgaccaccgtctccccagtaagcatcgttttccgtatgctcaaccagttttgcgggcgcggttgccagcaagagcgcacgcagttctgcatgctgttcgaatttagcgcgaagtgcttttcgcatcacctgttctttgaccgactcccagtttttacgcagaggcttagaacgatcgcgccccatgcgtgcggcgaccataggggaagaaacccgacggatctcttcgcggtatttttcatcaaggaatttttgtgcctgaaaatagtgttctgaggtgggccaggttttcccgtcaaccttgatgggccaggcggcaaagttagaaaaatcaccgtagtcatcgctggtgctgtagaaatttatgatggtgtcttgcatgacgtgttggatcctttgtgctcgaacgggcattaaaccgcattatgttggtggttattgcgagccgctttccagaaacagaaaaaccattacccctgaaaaccgaaaaatgccacaatattggctgtttatacagtatttcaggttttctcatggcattaaccgccgcgcttaaagcgcaaattgccgcctggtataaggcgcttcaggaacagatccccgactttattccccgtgcgccgcagcggcagatgattgcggacgtcgccaaaacgctggccggagaagaagggcgacatctggcgattgaagcccccaccggcgttgggaaaacgctctcttatttgattcccggcatcgccattgcccgcgaagagcaaaaaacgctggtggtgagtaccgccaacgtggcattgcaggatcagatttacagcaaagatttaccgctgctgaaaaagatcattcccgatcttaaattcactgccgcttttgggcgtgggcgctacgtttgtccgcgtaatctgacggcgctcgccagtactgaacccacgcaacaggatctgctggcgtttcttgacgacgaactgacgccgaacaatcaggaagagcaaaaacgttgtgcgaagctgaagggcgatctcgatacttataaatgggatggtctgcgcgatcatactgatatcgctatagatgacgatctctggcgtcgtttaagtaccgacaaagccagctgcctcaaccgcaattgttactactatcgtgaatgcccgttttttgtcgctcgtcgggagattcaggaagcggaagtggtggtggcaaaccatgcgctggtgatggcggcgatggaaagcgaagcggtattgcctgacccgaaaaatttactgctggtgctggacgaaggccatcacctgccggatgtggcgcgggatgcgcttgagatgagcgccgaaatcaccgcgccgtggtatcggctacagctggacttgttcacgaaactggtcgctacctgcatggagcagtttcgcccgaagaccatcccaccgctggcgatccctgaacgtttgaatgcgcattgtgaagagttgtatgagcttatcgcctcgttaaacaacattctcaatctctacatgcctgccgggcaggaggcagagcaccgttttgcgatgggcgaactgccagatgaagtgctggagatctgccagcggctggcaaaactcaccgagatgctgcgtggcctggcggagttatttcttaacgatttaagtgagaaaaccggcagccatgacattgtacgtctgcatcggttgattttgcagatgaaccgcgcgttggggatgttcgaggcgcaaagcaaactctggcggctggcttcgctggcgcaatcttccggtgcaccggtgaccaaatgggcgacgcgggaagagcgcgaagggcagctacacctctggtttcactgcgtgggaatacgtgtcagcgatcagctggaaaggctgctgtggcgcagtattccgcacattattgtcacctccgcaaccttgcgttcgctgaacagtttttcgcgtttgcaggagatgagtggtctgaaagagaaagcgggcgaccgttttgtggcgctggattccccctttaaccactgcgaacagggcaaaattgttattccccggatgcgcgttgagccttccatcgacaacgaagagcagcatattgccgaaatggcggcctttttccgtaagcaggtggagagcaaaaaacatctcggtatgttggtactgtttgccagcggacgggcgatgcagcgctttctcgactatgtgacggatttacgtctgatgttgctggttcagggcgatcagccgcgttaccgtttagttgaactgcaccgcaaacgcgtcgccaacggtgagcgcagcgtgctggtgggcttacagtcatttgccgaagggcttgatttgaaaggtgatctgctcagccaggtgcatatccacaaaatcgcttttccgcccatcgacagcccggtggtgatcaccgaaggggaatggctgaaaagcctcaaccgctatccgtttgaggtgcaaagcctgccgagcgcctcgtttaacctgattcagcaggttgggcgactgattcgaagccacggttgctggggcgaagtggttatctacgacaaacgcttgctgaccaaaaattatggcaagcgactactggatgcattaccggtatttccgatagagcaaccggaagtccctgaaggtatagttaaaaagaaagaaaaaacgaaatccccacgccgtcggcggcgttaatgatgtgagtcaggtaaggagtcgtaaatggactatcgcaaaatcattaaagagatcgggcgcgggaaaaaccacgcgcgcgatttagaccgggatactgcgcgcggtctgtatgctcatatgctcaatggtgaagtccctgaccttgagttgggcggcgtattgattgcgctgcgtatcaaaggagaaggggaagcagagatgctcggcttttacgaagccatgcaaaatcacaccatcaagctgacgccgccagcaggcaagccgatgccgattgtcatccccagttacaacggcgcgcgtaaacaggccaacctgacgccgttgttggcgattctcctgcacaaactcggttttcctgtggtggttcacggggttagcgaagatccaacccgcgtgctgactgaaaccatttttgaattgatgggtattacgccaacgttgcacggcgggcaggcgcaggcgaagctcgacgaacatcaaccggtgtttatgccagtcggcgcgttttgcccgccgctggaaaaacaactggcgatgcgctggcggatgggcgtgcgtaacagtgcacataccctggcgaaactggcgacgccatttgccgaaggtgaggcgctgcgtctttccagcgtttcgcatccggaatacattggacgcgtcgcgaagttctttagcgatatcggcgggcgggcgctactaatgcatggtactgaaggtgaagtgtatgctaatccgcagcgctgcccgcagatcaatctcattgaccgtgaagggatgcgggtgctgtatgaaaaacaggacactgctggtagcgagttactgccacaagcaaaagatccggaaaccacggcgcagtggattgagcgttgccttgctggcagcgaaccgattcccgaatcgctgaaaatccagatggcttgctgcctggtggctacgggtgaagcggcaactatcagcgacggcctggcgcgcgttaatcaggcattttaattcttttctcagccggatgagccatgtcatccggcttttaccccaccgcaatatgaaattcctgcatctttattgaccttcccacgcccggcgtgcagcataaaaatacaacaaacacataacataaacaggagttaaccatggaaagtggtcatcgctttgatgctcagacgctgcacagttttattcaggctgtatttcgtcagatgggtagcgaggaacaagaagcgaaattagttgccgatcatttaatcgcggcaaacctggcagggcatgattcacatggtattggcatgatcccaagctatgtacgctcctggagtcaggggcacctgcaaattaaccatcatgccaaaaccgttaaagaggcgggggcggcggtcacgctcgatggcgatcgcgcatttggtcaggtcgcggcacatgaagcgatggcgctggggattgagaaagcgcatcagcacggtattgccgccgtggcgctacataactcgcatcatatcggccgtatcggttactgggcggagcagtgtgcagcggcggggtttgtctctatccactttgttagcgtggtcggtattccaatggtcgcgccgttccacggtcgcgacagccgctttggcaccaatccgttctgtgtggttttccctcgtaaagataatttcccgctgttgcttgattacgccaccagcgccattgcatttggcaaaacccgcgtcgcctggcataaaggcgtccccgtgccgccaggttgcctgattgacgttaacggcgtgccgacgaccaatccggcggtaatgcaggagtcgccgttgggttcgctgttgacctttgccgaacataaaggctacgcccttgcagcgatgtgtgaaattcttggcggggcgctttccggcggtaaaacaacgcatcaggaaacgttacaaaccagtcccgatgccattcttaactgcatgaccactatcatcatcaacccggaactcttcggcgcgccggattgtaacgcgcagaccgaagcctttgccgagtgggtgaaagcctcgccgcatgatgatgataagccgattttgctaccgggcgagtgggaagtgaacacgcgtcgcgaacggcagaagcaggggattccactggatgcgggaagctggcaggccatttgtgatgcagcgcggcagattggtatgccggaagagacgttgcaggctttctgtcagcagttagccagctaaaaaaaagcccgtccagtggcggacgggcaaacaagggtaacataggatcaatgagggttagagcatatgcgtctgtcggcaaacagacagggaaatacttgtgctggacgtagcgtaaacgcctgatccgtccaacggttcggattttgtaggcctgataagacgcggtagcgtcgcatcaggcatctgttgccggatgcggcgtaaacgccttatccgtcctacgaattacttataaattaccgcagtaccgcttaatttattgttgttggtggcggaagtgatgctgtatccactggcaccggctgccgcggctttctcagccagtttcgcttccagggcatcgagggtggatgcgccatcggcagaaaccacgccgattttattcatgttctgtgcctgggatgccgttaccggttccgccgcgaacacgccaaatgacagagttgaaagagccatagcagcaacaacagtattgatagttttcataattaatctctcgcaggtgatttttgtataagtgacgttgtttcgtcgatgtgatgagtatcacgtttttttacgagagataaaatcgaagagaattgaccgccttgttcaaataaattgattgatatctaacctactgataaaccatttatttgttgtacttatgaacttgttttataccgcgtggcagtcacagcagcgttaaaggcacggaatgccacgcaaaatacaaattatactcgctatgcatctcgccagttgtagttaacgtaactggctgtctttcgaacctctgcgattatatcctgtataagctggtttttgtaaatctttctcctgctgacaatgaatgcataagcgcacgccaggaatggcttcccgacgggcctgcgggatgggggcaccgcactcttcacattcatccaggctttcgccgcgcggaatttcaccccgagcgcgggcaatcgcatcttcaattgtactgttgatctgttcgttgacggcgtcatcgttagcccaaccggatgccatatcgacctccccatatcaatacttgtacagttaagtgtagctaatccagggacgaactcgggcagttcaagcatcagatctccgaccattcccgcagcagattatgataaagattaagcagcgacaggatctcttcactttcgccgtagcggcttttcagcgactgaatattgttgtccagttcaaacagcatggcgcgctttttatcatcgcggatcatcgactggatccacataaatgatgccactcgtacgccgcgggttacgggtgtcacgcaatgcaggctgctggagggatacaacacgagatcgcctgccgggagttttacccgatgttgtccgaaggtgtcattaacgaccagttcgccgccgtcgtagctttgtggatcgcttaaaaacagcgtggtagaaaggtcagtacgcatccagccgttttgtggatggctgcgtactgcgccatccacatggaaaccataggtttcattgttctgatagcgattaaacagcggcgtggaaagggtacgcggcaaggccgcggcaaagaataaagcatgttggttaaccgcgttcagcacctcattttgcagggcggcgtataacgtgctgcgggtgtcgacctgttgattgttcttaacttgcgcaccttgtgcgccggtggtgacgcgtccatccacccattcggcttgttccagttgttcgcgaaaacgagcgacgtcctgtggcgataacacgccgggaatgtggtacatcatacaatttctccaaaaagtggggcctgcgccccacatctgattcagaaatgcatattggctgtgagcaagaaggttcttggctcgcccgggtgataacggtagccgctcttgttgattgaggcgacgtaatcggtatcaaacaggttgtaaacgtttagctggaagtcgagattgcgattaactcgataccccagtttggcatcggcgacccagtaaccttcggtaaacgctggcgttcccaccgcgccgtctgaacctttatgcatactgccgatatagcgtgcgcccgcgccaacagagatatcgtcggttgcctgatattggctccataaggtgaaggcgtgctccggggtatacggcagcgatgaggaaccatcctgggcaacatctttgccgtttttgatggttgctttttgctgggtatagccgccaatcacctgccacgcgggagtgatattcccggccacggatatctcatagccttcgacgcgtttcttaccgtattgcgagtaagtcccgtcatcattttgctcaacttcattttcgatatcagtacggaacagcgcggcggtgagcaacaggcgtttatccagaacctgccatttggtgccaatctcgctggtgttggctttttgcggtttaaaatcggtgcggttggcactgttaccgctgccagactgcgcaagggcgaagttgttgccgcctggaggctgctgggaaacggcatagttaatatagacattgccgttttccgtcaggtgatacagcgccccggctttccagttcaccagattgcccgacttggcggtgtcgacggtggtgaccggagaaccttttgccacaccagttgggcaggtgatggcaccgcgtccgctgccgccgcaggcggtggcactgtcatattcagtatgataattatccagacggatcccgccgttcagctcaaaatcacgggtgatttgcagcgtatcaaaggcgtaaattgcgaaggtatccgtctgaccattggcgtttgcgccgttgcgcgtcaggccgccgggatgaatgctgctgtcaggatgataaatatttaccgcgggtaacgtcaccggattaacgccgtagttagtctgcgtttcacgggtaaattccacgccggtactgacatcatgaccgatagaaccggtatagaacgtcgaggtcaggttggtctggttggtgagaattttattactcacatctttggtattcgccgtgcgtgaccaggtccagctattcacatcgctggtgggctgagtaatattcgacgccccgcccataatcgccgtcatcaggtaatcctgctttacgcgcgaccaacgggtagtattgcgaatggtggtgttatcgttgatgtcgtgctcaaaacgcatggtggcggtgtcggtggtcgaatcgtcgtaatcggaatccgtgccgtaaaagttatgagtatcaacttttccggaatgattcagggccgccgttcccgcagatggggcagaatagcccggcaaaccgatggtcggaatgccgccgtctggcgtgttgtgctgggtgacatgcagataattaagatacaaacgattcgctgtaccaaggccaaaagcgacagaaggggcgacgccgtaacgctcatttttgactttgtcgcgtccggcatcgtgcgttttttcgcccattacattcaggcgcaccgcggtggtatcaccaatgacctgattgacgtccagcgtgccgcggcggaaccaggcgctgccaatactggcggaggcgtcaatgccggaatcattgcgcggctgcttgctgatcatattgatcgagcctgtcggtgcgctgcgcccgtagtcggtgccggacggccctttaatcacttcgacctgctcggtattgaaggtgtcgcgcgagacgctgccgatatcgcgaatgccatcaatataaatactgttagaggtatcggcaccacgcatataaatggcgtcgccagtggtggagttaccgttctcacccgcaaaaaacgcacccacgccggggacgtttttgagcgcgtcggtaaggttggttgcgccctgatctttaatcacttgttcagaaattaccgtcatcgtgcgggtagtatccgctaccggacgcgagaatttcggatcggcagattgttgtggcgcataaagcgaaggcgttgatgcttcgacaaccagcgtgtcatccgcgttagtttgcccttcggcggcgagtgcctgagccacaggcgtgatgccaatacaaagaccggcaaagaacgtgagcgaatgaaattgtctggcagggaaattgcgattgttttccattttgcaggtgactttttcttatatgttgaaattttcactgccacgagaaagcctctctgcggatgcgatgccactgttaatcccgtgatagtgctcgtgaaagtgataataattttgataagcattatcacttggagcgattttctatcacccattgcgcgaaaaagaaatacatttatttacattgagttcatatttgatgttttttgattacaaaacagacgaaaactgcatccagaggcgaatgcagttacgttggtggggttatttgtagatggttgcagtaccgaacatctggtcatttccgcctgcggaattaatgacataacctttcgcgccttgttcgcgcgctttttctgccagtttatcctccagatcgcttaggtttgatgcgccagttgccgaaacggtaccggcgggccgtagctgaccgctgtccaggttactcatcggttgcgcggcataagccgtgagagagattccgctcaggacggtggcaatcagtagtgtgaggcactttttcataatgacatcctcataaatacaacgggtagtgcctgataagtgtaggtcgcctgcgcgatgcaaatgacgcaaaaaattgacagagatgtgcttattttttgaacgatatatttttacaaaataagacaaatcaatgacatgcataatgctgatttttatgatgaattgccataaaccatagccatgttaaggttttggggaatgataaacgcagccagatatttaccctgtcgcgttatgcgggtatcttacgccgctgcttaaaggagaatgctatgtccgcccagaaaccggggttgcatccgcgcaaccgtcatcacagccgctacgatctcgccacgctttgtcaggtcaatcctgaactcaggcaattcctcacgcttacacccgccggggagcaaagcgtagactttgccaatccgctggcggtgaaggcgctcaataaggcgttgctggcccatttttacgccgtagcgaactgggatatccccgacggttttctctgcccaccagtaccgggccgggcggattatattcatcaccttgccgatttactggcagaagcaagcggaacaattccagcgaatgccagcattctggatatcggcgttggtgcgaactgtatttatccgctgattggcgtacatgaatatggctggcgttttaccggtagtgaaaccagcagccaggcgttaagcagtgcgcaggcgattatcagttctaatccggggcttaaccgcgccattcgtctgcgtcggcaaaaagagagtggggcgatttttaacggcatcatccataaaaacgagcaatacgacgcgaccttgtgtaacccgccattccacgattccgccgctgcggcacgggcaggtagtgagcgtaaacgccgtaacctggggctgaacaaagacgatgcactgaactttggcggccagcaacaggagttgtggtgtgaaggcggtgaagtcacctttatcaaaaagatgattgaagagagcaaaggcttcgcgaagcaggtgatgtggtttacatcactggtatctcgtggtgaaaacttaccgccgttgtatcgtgccctgacggacgtgggcgcggtgaaggtggttaaaaaagagatggcccaggggcaaaagcagagtcgctttattgcctggacctttatgaacgacgagcagcgccgccgttttgtcaatcgccagcgttaaagcgttggttcccccggcggtaacggttcagccggggtcgcgcccggagcaggcagcacctgataagtctgcactggcgcgcgaacgcccgccaggtcgaaatgttttttcacctggctgtcgagggcaaagcgtaccgtccactgtttgagtggcagcgtggtgaacgaaacacgcagtgtaaacgcggtattgcttaagccgacaatcccggcaaaattcggttcaccaataatcagcccgcgaatttcttcgttttccattaattccgctaccgcatctttcagtgcctgattggctttatcagcatcttcatggcgatcaacatcataatttgccaccaccgaaccaatgccgcggacaaagttagcaaaggtggttatcgaagaccacggaatgatgtgatacgccccggtatcctgtcgtacgcccacggagcgaatcgacatccgttccactgtgccggtcaacggcccgatagtcaccaaatctccagtgttcatgccgttttcaaactgaataaataccccggtgataatatctttcaccagcgtttgcgaaccaaacgagatagccagacctaatgccccggcacctgccagcaatggcgcgatattgacgccgatttccgacaacacaatcatgatggtgatggtactgataatcaccgccagcgcgttacgaaacagcgtaagcagggtacgcgtgcgggcgctgggtagcgggcggccatgaatatccgaagccagccggttttcgatcaaactggcgagcaccgtccagccaaccgccgagaagaaaagaatgagtgcgatacggatcaggatatctacggttttctgccccgcgccgttttgcagccagttccagaaatcgaacaatccccatgcgctcaacagcaacattaccgccacgcagactgtcagaatacgcgccgttttcagcgccgccgacagccagccattcaaccgtttttgcagctccggatagttacgctgagtatgtggcgagagagtgatggttttcgccagccagcgggaaaacataccggaaacaaacgctgcgataccaataatcgccaggctgcgcaccgttgcacccatcataaatttcaggctgttgcccggatcgaacaacgaaaagaaaaacagcacgataaaataggcgcttgccagccagtgccacaccagcgcaaaggcgcggataaacaggctgaaaaaggccagcgaatgctccgcgaagttgagcaaatgctgggtaatctcttttttattacgaaagatcaggtacaacgcccagacggtcatgcacagcataatgatgacgttcgccagcgcacctatctgtacattcacctgattagagataatcggcacggccacaatcaggccataacctatcaaactgcttaaccagctcaggcgacgactccagtaacgggcgctctcgtcctgaatcgtgaacgggcgcagctccgccacgtttgggcaaaaaatcaggcgtagtacggctttgaaaaattcaatgagggcaaaggcgttgagaaacaaactttgttggaaagcgatggtgcgactgcctgcattcaggttgtcgcttaatacctggccgacaaataatgtcagggccagtaacagcaggtcgataataaacgccccgataatcatcgccggaagctgcaaccagttgctgcgctcacgatttttttgccgcgcccactgacccattttgcgatacagcggcagtgcgcacaggcgaatcagccagtaaaaaccaaacactaataccgctaacattgaaaaatgggtcagcgcattgctgaaggtttgtggattaaacggcttatgcggggagccggtgatattgcgataaagttgcccgaagcgggcggaaagggcttcaccataatggcggctgacttcggtgaccttttgcagcacggtttgctcttcgaccagcgtcggcggcactatttttggtaccggttcagcagggggcgtagcggcaacggtgcgcaactggtcgatcaactctttacgcgaggtgtcattatccagcacatccgccagtgcgccataggccgcttttttttgttcgatatccggttccggggccggttcagtcgttgagtccgttgtcgttgtggttgtaacgccgggtatggataccgcgtgggcaggtgcgcccagcaggcagaagaggatgaacaggatccaccgcatgactcctccagtgagaaaatagagcaaaaagataagtatagatgctggaggaggggcgattttaaatgagaggaatctggtgtgcctccctttcgggtgaaagggaggaagggatattaagcaggttgctgacaacgtgcgggcttttttgccggatgcggcgtgaacgccttatccgtcctacaagttcatgcaattttaataagttgccagatatcctgtaggcctgataagcgtagcgcatcaggcaatgtgtcttattaagagacgtgctgcaaaaattcctgcaagcgctggctcggcgggttcttgatcaacacctgcggattgccatcttccgcaatccggcctttgtcgataaagatcagccgcgaagctactttctcggcaaaaccgatttcgtgggtcacgatcaccatcgtcatcccttcttcagccagatcctgcataaccttcagcacttcatggcgcagttccgggtcaagagcggaagtcggttcatcaaacagcatcattttcggcttcaccgccagcgcgcgggcaatcgccacacgctgctgttgaccaccagaaagttcggaagggtagtgatgtgcacgttctgccagaccgactttcgccagcagctcacgtgccagtttttccgcctcttctttgttcgcgccacgcacgcgtagcgggccaaacatgacgttttccagcgccgtcagatgcgggaagaggtaaaactgctggaacaccatacctgcttcctggcgaatcaggcgctcgtcaactttcggatcgttaaccttcaggccatcgacaatcagatcgccggaggtgatttcttccagtttgttgatgcagcgcagcagggtcgatttaccggaaccggacggcccgataatcaccacgacttcgccctgggcaatgttcaaatcgatattgtgcagcacctgggttgggccaaagtgcttggagacgtttttaaattcaatcacaggattttcatccttctttccagacgacgcagaataaagctcagcaccagggtaataatcagatagaacaccgccacggcgctccagatctcaagggcgcggaagttaccggcaataatttcttgcccctgacgggtcagttccgccacgccgatcacaataaacagcgaggtgtctttaatgctgatgatccactggttacccagcggcggcagcatacgacgcagtgccagcggtaaaatgacgtagcgaatggtttcccaacgtgaaagaccgagcgccagtcctgcttcacgaaaacctttgtggatagacagcaccgcaccacgcgtgatttccgcaatatacgcgccggagttgatcatgatggtgaccaccgccgcagtaaatgggtcgatgcgtaagtcgttaaacgccatcggcagggcgaaataaataaacatcacctggacgacgataggtgtgccgcggatcacttcaataaagaccagcgcgacgtggttggctatccaacctccgaaggtgcgtgcaaaacctgccagcaatccgattaccagaccgcctgccagaccgaggaccgaaatccacagggtcattttggcaccttcaatcagaagcggaatggcaggccagatggcactccagtcaaactgcatatgttgttcctgttaccgtggtgtaaataatcaaattcagggtaattaatggccccggagcgggtttgcgcccctcaccctaatcctctccccataggggagagggaactgccagtgcgttttacaggtgtagcgttattatttcggttcagtaccgaaccattttttgtagatttcgttgtaagttccgttctcgcgcagggttttcaacgcgccgttgactttgtcacgcagctcgtcgctacctttcgggaacgcaataccgtattgctgcgcttccagagagtcacctaccgctttgaactgaccgttaccggcggttttgatgaagtacagaatgtttggcgtatcgtgcagaacggcgtctgcgcggttggtgcccagttccatataggcgttatcgatgttcgggaactgacgcagatctttagttttgatgtttgctttcgcgtaatcaacggagccagtaccgctcttcacagcaaccactttcccgtcgagatctttcacgcttttcacatcgttattgttagctttcaccatcactaacaggccgcttttgtagtagccgtcagagaaatcgatcgcttttttacgctcgtcggtgatggtaatgcccgccagcgccagatcgacgtttttggtttgcagtgccggaatgatcccactgaaatccatcggcttcagttcgtaatccagcttcagctctttagcgatggcagcccacagatcaacgtcaaagcccacatatttatcgccctgtttaaattcaaacggaacgaaggcggtatccgtcgcgacaactaattttttatccgcggcatgagaagaaaccgcaaaagccagggtcagtgcagccagtgaaacttttaatacagacttcatagcatttccttttttctatccacgggacgatcccctgcgtgacattcacatatatgaaaaaatcgtgccagttttgcaactccttgatttttcgagatgcggcaaaaacgtgatgcacgatttatagggcaataccctgaagatgcaccattctggggcaccaatctggtgcgctaaaattgtgtactcaacacagtgattatttagcgtaaaacctgatgaaaaaacaatctttatgtaacgattgtgtgatgatgtggatacaaaaaatttacttaatcagctggagatagcagatggatgcactaaataagtgcgttgaggtgggctgcaaaacaaaacggcctcctgtcaggaagccgcttttatcgggtactaaagttctgcaccatcagcgatggatttattcgatgttagactcgataaaccacaggaatttatccaggtcgcgagacgcggcggtcaggatatctgcggtgtcgtcatctttcgcttcgccaatcgctttgcgtacgtcattagcgacgattgcgtaacggtcagccagttctttcaggtgatcctgaacgttgtggatgtccagcgggtaacttttcagcggggttttgctgttgataacttgagtggtccccagagctacaccgcccagctgcactgcacgttctgccatggtatccagatgatcgatcagtgcggtgcggaagccatccagcatttcatgtacggcaatgaagttagcgccgcgcatgttccagtgcgcttgtttggtaatcaaagaaagatcaataaactggataacctggcgattcagcaactctactgttgcttttttctcgctgtcggagacatcgttgcgggtataaagcagattggtcgcttttgatttaactaatttagcggtactcataatttcatatcctcttgatgttatgtcccagtaattaacgagactaagtatagcaccggctatgtgttccgctattctggctgttcctatcacactaatagtggtaacaagcgtgaaaaacaaaactaataaagattcaatgagttagatatattgataagaacaattcttatttatctgctcgccaggaattttcggaataaatatgcttttgcataattcgatatataaagacggtgtagaggaaaagtagcgagaaattctgcatggttatgcataaccatgcagaaatgtaaatttaattaatgtctaattcttttattttgctctctttgcgtactgtcagcgtagaccccattgaagcggcgataatcgcgccgagcgccagtagctgtatgggtgtcagtgtttctccgaggaaaatcatcccggaaacggcagccagcgccggttccatgctcatcagcgtaccaaatgtccgtgttggcaaacgggtgagggcaatcatttccagcgaataaggcagagcggtcgagagaatagcgacagccagacccaatggaataaccgaccagtgccagagtgcttcaccagcctgaagcgctccaattggcacgaaaattaacgctgcaatcaacgaaccaattgccaccgtcgcagggccatgttccgctcctgcgcgttgcccacttaaaatgtaaatagcccaacaagccccggcccccagtgccagcgcacagccggttaaatcgacatgggaaacgtcttgccccagcggtagcaggaaccacagaccaagaaccgccagcacaacccagacgaaatctaccgggcgacgagaagagaacagcgccaccgccagtggtccggtgaactccagcgccaccgcaatacccagcggtactgtctgaatagaaagataaaaaagataattcatcccacccagcgaaacgccgtaaaacaacagcggtaaccgttgctctttggcaaagcgcagtcgccatggcttaaagaacgcgatgaggatcagcgttcctaatgccagacgcagcgcagtgacacccggtgcgcccaccagaggaaaaagtgacttagctaacgaggctccaccctgaatagacgccatggcaacgagcaatatgactattggtaaccagaccggcattttacgtaatgaaccaggcatcctttctcccacaaatatctagacttaagtaaagcgtggagtgtactggatatacccaatgctggttgagcatttgttgaaaaaattttcccccgttttgactaaaatgcgccaggattgatggaatcattagtctggtgattaggaataatctggatgaatgacagggaaaacatgcgtaatacttacgcagttctctgaaaaagtgatttaaatttagatggatagcggtgtatggaaacgttctgttacatgaaatggcccgttagacatcacaaatcgcgaagagtttcccattaatttttgatatatttaaaacttaggacttatttgaatcacatttgaggtggttatgaaaaaaattgcatgtctttcagcactggccgcagttctggctttcaccgcaggtacttccgtagctgcgacttctactgtaactggcggttacgcacagagcgacgctcagggccaaatgaacaaaatgggcggtttcaacctgaaataccgctatgaagaagacaacagcccgctgggtgtgatcggttctttcacttacaccgagaaaagccgtactgcaagctctggtgactacaacaaaaaccagtactacggcatcactgctggtccggcttaccgcattaacgactgggcaagcatctacggtgtagtgggtgtgggttatggtaaattccagaccactgaatacccgacctacaaacacgacaccagcgactacggtttctcctacggtgcgggtctgcagttcaacccgatggaaaacgttgctctggacttctcttacgagcagagccgtattcgtagcgttgacgtaggcacctggattgccggtgttggttaccgcttctaatcactttggtgatataaaaaatccgcctctcggggcggatttttgtttttaaggtttcgggtcgaaaatatcggttccgagatggttgtaatccaccttctgtaactggaagttggtgatgtatatcggcccggctttcttctcagatataaacgggtatttgatgttaatttccttcgctttaatccccgtccactgggagaaaaagcctaagaagtcattggctgagcggcgggctttaatcacacgatgcgctttatcgtcgctggaaatgaccataaaaggcacctggaaattttgctgatatttatcatcatgggcaaggtattgcacgtctttaccgcgctctttaaaggccagaccgtggtcagaaaagtaaaccagcgagaagctgctgccgctgttgcgtaactgatcgtacagcttgcgcagtaaatcgtccgtttgcgtcatggtatagagatagcacgacgtttctttcgattgcacaaaggtttcgtattttccttgtgtcctgtcgcaggcctgcggatgtgagcccatcagatgtagaacaatcagctgcggttgcgagtgctcttgcgccagcacttgagcggtcatatccagtaacgcttcgtctttggtgtttttatctgcttcaaaattaccttctttcaggaagtacacttcatctgctcgtttggcgatgctggcgatagcggtatcgtattcgccgatttgaccctggttggaaaaccaccaggtctggaagcccgcgcgatttgccagggtgacaaagttatcctgaaactgtggtttgccatcgacaacgcgattgagcgttaagccaagcgatttctgcgtggagccactggcggcaatgtagtcagcaaatatcaaaccgttaacgctgctggcaaacggggtattgtcccagtgaccgccaaaggcaccgagggcatcgcgacgcgcgctttcaccgatcaccaccacataggtctgatacttcggcttaacggcagtgaccgtccaggtatctttcattccggaaagttttgccatccgttcttgctcttcaatcacctcgttattattgacgatgacatccttagcaaaacgaaataccggatagccagtatctttcagtttaaatacgccaccccaggccaggttttgcacgggagcaacaaaaaatgtcgccacactgaataccagacacaggctgtcgaaggtattccagcgcgctttttcattctctttttttcgcctgattgctattacgccgagcgcaaaaataaataagccgaccaggtagctgtaccacggaaaaatcgtcaggatttcggtcgactcttccatattggtggagtgcaatgccagcaatgtattgaaattaggcgcgccgtaggcctgagcaaaagggaaataacaagccgccaccagcgaactgacaccgaccagaactttttgtacgcgaggcaatgttcgccatagcaaaagcaaaatagccgtaaacgcagcggtgtagagcaaactgaaggggtaacctaagccgaggttaattaatagcgactgtaaaaagtagaacgcagtccacgggctaaatacccggctacgggtaacaagcgattctttgagggttaaattcatatgccactatcgtaacaaacgccatgtgcttaccctggcgtcaagggtcaatacctgcaagagtgcgtgaagagtggaaaggggtccgcatccgcgagccgcaatatacgcagggctgcaagaagatagagcgagccgccgttcaggtcaactactgacgaacaaatcttttgcgaaggggattgcaaatccgacaaaaagtggggtttttcagaccaaaacgcgttatgcctgcatgaaagcaggagtgaagcggcgtaccgcgacgccgctatttatcggaaggtttatcttgctgcggtttgttgttgaccatatcgcacaacatagagagcagcattaaccgtactttaaagggagaatgactaaacacgcgcatacacctcttgaactcattcataagacctcctgacttgctaatcccgtcgatccttgagggatgattgcattacatacagatatagcacaggctatattatatagctattgctaaaacgttaattttttgtaccttcgcaactctggtttacaatgtgcgcacgaaatgagaacgctatgtatgcgtcaccataatgaggaagcacaatgagtcgtcgcgcaggtacgccaacagcaaaaaaagtgacgcagttagtgaacgtggaagagcacgttgaagggttccgccaggtcagagaggcgcatcggcgcgagcttattgatgattacgttgagctgatttctgacttgatcagggaagtgggggaagctcgtcaggtggacatggctgctcgtctgggagtttcgcaaccgacggtggctaaaatgcttaagcggctggcaaccatggggctgattgaaatgatcccctggcgtggcgtgtttttaacggcagaaggagagaagctggcgcaggaaagccgcgagcgacatcagatagtcgaaaatttcttgttggtgttgggcgtcagtccggaaatcgcccgtcgcgacgcggaaggcatggagcaccatgttagtgaagagacgctcgacgcttttcgtttgtttacccagaaacacggtgccaaatgagtctgccttttttacgcacgctgcaaggcgatcgtttttttcagttattaattcttgttggtatcggattaagctttttcgtgccctttgcaccgaaatcctggcctgctgctatcgactggcacaccatcatcaccttaagcggcctgatgctgctgaccaaaggtgtggagttaagcggttattttgatgtgctggggcgcaaaatggtgcgccgctttgctacggagcgtcggctggcgatgtttatggtgctggcggcggcgctgctttctacctttctgaccaacgatgtcgcgctgtttattgttgttccgctgactatcacgctaaaaagactgtgtgagatcccggttaatcggctgattatttttgaggcgctggcagtcaacgctggttcgctactgacgccaattggcaacccgcaaaatattcttatctggggacgttctggtctttcgtttgccggatttattgcccaaatggcaccgctggctggcgcaatgatgctgacgctcctgctcctgtgctggtgttgtttccctggaaaggcgctgcaataccatacgggggtgcaaacaccggagtggaaaccgcggctggtgtggagttgtctggggctgtatatcgtctttctgacggcgctggagttcaaacaagagctgtggggactggtgattgtggcggcaggctttgcgctgctggcacgtcgcgtggtgctcagtgtggactggacgctgctgctggtgtttatggcgatgtttatcgacgtccatttactgacccagcttccagcgttgcaaggcgtgttgggtaacgtgagtcatctatctgaacccgggttatggttaacggcaatcggtttatcgcaggtgatcagtaacgtgccgagtaccatattgttgctgaactatgtgccgccgtctttattactggtatgggcggtaaacgtaggtggctttgggttattacccggatcgctggcaaatttgattgcgctacgtatggcgaacgatcgccgcatctggtggcgtttccatctctattcaataccgatgctgttgtgggcggcgttggtgggatatgttttgttagttatactcccggccaactagggtctggcaaataaaaaaggcggattatgagtccgccttttgctttaagttttgaagattaattcagacgaaccggcatcccggagcggtttttaatcgcttcatcaagaacaacctggtcaacatctggctgaccggtcactgtctgcacgctcttcgtcagggtaattggcacaatttcctgaccttcaaactgggcttcggtggtagacagcgggttatggacttcaatataacggctgccgtctggctcggtggtcgcttttaccggctcatcaataaactgtacgcgggtaccgaccggtactttctcgaacaggaatttgatgtcttcgttacgcagacgcacacaaccatgacttacacgcaggccgataccgaagttggcgttggtgccatggatagcatacaggcgaccgatatagagtgcatacagccccatcgggttatccggacctgccggaacgacagccggaagcggttcgcccgcagcgcggtactctgcgtgcattttggcggtcggcgtccaggtcgggcctgcttttttacgctcaactttggtggtccagttgataggcgtatctttgcctaactgaccaatgccgatcggcagcacgataacggtgttggtccctttcggatagtaataaagacgcatctcagcactgttaatgacgatgccttcatgaacggtatccggcaggatcagctgctgcggaatgttcagtacagtaccgcctttcggcaggaaggtatccacacccgggttcgcttccatcatattggaaagccccatctggtactcggcggcaaaatactccagcggctgagtgttaccttcaggaatggtgatcacctgattctgaccaaccaggcgactcccgtcggttggcagaggataagttaccgcagaggcggtactgcaaaagccgacaacagcgaaggccgctgcgaataatgttttcaatttcatattcatgttaagcgagattttgtgcctggcaggccattgggttgagaatattagagtattggaagcgcattataagttcattccagctcacagtgaaatcagatgtgtacgaaatcacattttttgcctttggcttgagtgtagaccttaagcgaggagcaggatcttctttcagacttatggcataatgcgcggtttgtcatatctcttttcaggatacgcctgtgttagtttccagtaacgtcaccatgcagttcggcagtaagccgttgtttgaaaacatttccgtcaaatttggcggcggcaaccgttacggcctgattggcgcgaacggtagtggtaaatccacctttatgaagatcctcggcggcgaccttgagccgacgctgggtaacgtttccctcgatcccaacgagcgcattggtaaactgcgtcaggatcagtttgcctttgaagagttcactgtgctggatacggtgatcatggggcataaagagttgtgggaagtgaagcaggagcgcgaccgcatctatgctttgccggaaatgagtgaagaagacggctataaagtggccgatctggaagttaaatacggcgaaatggacggttactctgcggaagctcgcgccggtgaactgttgcttggcgtgggaattccagtggaacagcactacggcccgatgagtgaagttgctcctggctggaagctgcgtgtgcttctggcgcaggcgctgtttgctgatccggatattctcctgctcgacgaaccgaccaacaacctcgacatcgacaccattcgctggctggaacaggtgctgaacgagcgtgacagcaccatgatcatcatctcgcacgaccgtcacttccttaacatggtctgtacccacatggcggatctggattacggcgagctgcgcgtttatccgggtaactacgatgagtacatgacggcggcgacccaggcgcgtgaacgtctgctggccgataacgccaagaagaaagcgcagattgctgagttgcaatctttcgttagccgctttagcgccaacgcctcgaaatctcgccaggcaacttcgcgcgcgcgccagattgataaaatcaaactggaagaggtgaaagcctccagccgtcagaacccgttcatccgttttgaacaggataagaaactgttccgtaacgcgctggaagtggaaggtctgaccaaagggtttgataacggtccgctgtttaaaaatctcaacctgctgctggaagtgggtgaaaaactggcggtactgggtaccaacggcgtcggtaaatcaacgctgctgaaaacgctggtgggcgatctgcaaccggacagcggcaccgtaaaatggtctgagaacgcgcgcattggttactatgctcaggaccacgaatatgagtttgaaaatgatctgaccgtgttcgaatggatgagccagtggaagcaggaaggcgatgacgagcaggcggtacgcagtattctcggtcgtttgctgttcagccaggacgacatcaaaaagccagctaaagtgctttccggtggggaaaaagggcggatgctgtttggtaagttaatgatgcagaagccgaacattctgatcatggacgaaccgaccaaccacctggatatggaatccattgagtcgctgaacatggcactggaactgtatcagggcacgctgatctttgtttcacacgaccgtgagttcgtaagctccctggcgacccgcattctggaaatcaccccggaacgcgtgatcgactttagcggtaattacgaagattacctgcgtagtaaagggatcgagtaagtgattatccgtcaccccgatactgtcggggtgacggcggctgatgacaaatgcaaaatagcctgatgcgctacgcttatcaggcctacgcagtacctgcaatatattgaatctgcaggactttgtaggccggataaggcgttaacgccgcatcaggcattaacaaagcgcatttgtcagcaatctgagtaacgtcgaatcgattttcttaatcccacatcaattcacttccattaattctcaaacatccatgcccaacgctcgcttaccgtgaatgttgaggtcggcaagcgtaaagcgtccttcccagtttgtttcatagtcctcgcgcgggaagtcgcccggcgatgcgcctttttccagtgcggccttcaccttgtgcgcgtaggcaagatttttctcgcacatcggtgccgcaggaatgtacatcacgttgccccaaccttgttgattttcaacgggggcaacggaatggatgacgtcgcagtgccaccagacggagtctccggcttcgagttttggaatgctggttaacgcctcaatcaacagtggatgccattgctctgataccggcaatactcttccgggcgctacgccgcacagttcatcctccggcacatcatcaagcagcggacgtaacagtacgtacgccatagcttcaggaatgggcacgacgtgcagcagcccctgaccaggcagcatatcagagagcgctgtccagccctggaatgtccgaaacacggaacatttggtggtgttgtccaccgtgtactcttcaacttccgtacgatgtgccgcatgccagggatcatattgcgccagattgccattaaagacgttggcgaaaacgcgctgatacgctggaagcagccagcgttccagtgccccggagtcggtatgcgctccaagacctttggaggtcgttccgggcggacggcggcggatacggtcagggtagatgacgctcacatccgggttaaaccattgctttccatcactttcaaatgtccacagacgattgagaaacgactgcgcattcgccatttcttcactctggcgggcctgcatttgcgcctgcgaccagtagatggggtaaatctcgggacgtgaagcgctgagcgtcccgaagaaattatcgccggggcctttgtagacctcgtcaaagcggttgcggtccagatagtccagcatcgactgatcccagcctagcgcttgttcgcgggggaagtggccttttatcaccgcacaaccgcgacgtttaatctgttcgcgctgctctgcagtaacatgacctgctttgatatcggcataagacagcaccggccagacggcatcgccctgtgctttgagtgcgttgatttcagccactcgcgtggcaatgtcatcgcttagctgattaaagatctgctggacgtcgccaagctgcgcccgcagcgcgtgcttcatctgacggatagctgctttgtgatcggcaggcaatgtgtcgctggtaaaagtagaagccataaccacctcgcattaactttcattcgaaactatgatgatttgcatgtgacaatataagttataaataagttaatgcaagtttaatgatttgatgtgatgtacaggatgtaaaaagaagggaaaaccggagcgcatggctccggtagagaggtcagctgttaaaaggggatgtgttatccagcaccgcctgaatcacattcagcgcgccttcgtgattattatcatcggtagcgtaacgggcgatttgtttaatgttttccgcagcattgcccatcgcaaaggaataacgcgccattttcagcatctccgcatcgttaccgctgtcgccaatcgctaccacattttgcggtgacagatcccagcgtttcagtaaccgcgaaataccgtttgctttatgtagaccgggaataatcaggtcgataaagccaaaaccactggtgacgggtttcataatgccatcgagcgctacgtgcagtttgtcgatcactaacgggatttgttcatccggaaggttgagcgaaaacttgaacagtacgtcgtcaatctcctgataatcttttacaggtttcaggcgatggtagtgttttgccatcagtgcgacaaatgcttcgggggcattttcgctgacatatgcactttgcagaccgcaggcgacaaaattgagttgcttatcttttagcaactcgccaataacaatccgcgattcatgtcgggtcagttcgccgtggaacagttgcttgccatgttcgtaaaccagcgcgccgttttccgcgacaaaagagatctcatcttttagctcaggaaagaacgaaataagctggtaatactgattaccgctggcgacaacgaactcaatgccgcgctttttcagttcctgatattgcgccataaaacgtggttggttgtacgttttggcgtcgttaagaaaagtaccgtccatgtctgtgacgataacttttacgctcataggtgtgctcctggctcgaaaatgaaaccgtaacagtgtaataacaatgtgacacagagcacaaattatatttcgaatgaaagtaaggatggaattgatgatgtgaatgatttggcccggcgacgccgccgccgggctgagaagattacagcatatgttcagtacgggcgatgatatcgtcctgtgcgtctggagagagcgcggtgaagaaggcggaatagcccgcgacacgcactaccagatcgcggtactgatccggatgttttttcgcttccagcagcgtttcgcgggaaacgatgttgtactgaatatgccagcctttatgcacttcaaagaaggtacgcagcaggatcatcagtttctgcttgtcagattcgttctccagcgttgccggattcagtttctggttgagcaacacgccgccgagaatcgctgccgtaggcagtttacccactgagccaatgactgccgttgggccgagatggtcagtaccggaagccgggcttgcgccttctgccagcggggtatgcgctttacgtccgtccggcgttgccatcgtctgcgcgccaaacggtacgttagcggagattgatgacgtacccgcgtaatagttgccgccaaccggaccacgaccgtagcgcggattatggtactgtttcagttcgtcgatataggtctgataagcgcgagccagcagcatatcgacggtatcatcgtcgttgccgtacttcggcgcaccgttaatcagccgctgacgcagttgctcatgagtcaggccttcgaagtcatccgccagtgcggcagccagctgttgctgaccaatcgcgccctgttcaaacaccagtttcttcactgccgccaggctgttgccgaggttggcaatgccgacctgcaggccagaaacccagtcatatttcgcgccgccttgcttgatactttttgctcgctcaatacagtcatccaccagcgccgagcagagaatatcgtgcacgttctcctccagcatggtgtcaacgacatactcaatttcgattgatttgcgggtgtagtaacggatttgcgtatcccacgcgtccatcacttcatcgaagttgttgaagttacctgccgacaacgctttttcttgtggcaggaacactttgccgctggtggcatcacgaccgccttccagcgccgccagcatcacgcgggcgaagttgataaagctcatgccggtacagcgatagccccatttgccaccgacggcggtttcgatacaaccaatcgctgcatagtcgtaagcgtcctgcggttcaataccgagtttaataaattccgggatcacgatttcgtcgttgttgaacgccggcatcccgaagccgcaacggatcacctgtacgcaggcgtcgaggaaatcgttgctcattcctgcatggtaacgcacgctgaggttaggctgagtggaacgcaggcgaccgcaggattcgaggatcgcgtaagagagtggattcaccgcgtccattggttgaccatcaaccagattttgtccgccaatggtgacgttctgatacagcggacttcccgcagaggctttcgagtgcgagccggagcggattttgttcacttccagcagtttcagccagcagctatgcagcatctcgatggcgtgttcgcgatccagtgtctggttgagttcaacgtcgcggcgatagtacgggtagagatactggtccatacgaccaaacgatactgagtgaccgttagattcgatctgcaaaatcaactggatgaagtaacacagttgcagcgcctgccagaaagtctgcggcggctggtgggcgataagatcgcagttttctgccatcgccagcagttcatcgcgacggctttcgcgggtttcggtcgcggccatttcacgcgccagggcagcgaaacgttcaatgtgttcactgactgccaccagcacgatatcaatcgctttcaggaattgttcgccgtgcaaatcttccagcaccgtcagattgatgcgcgagcgacgttccgctactttctcgcgcagaccatcaagccctttttccagcagtagcgggaaattgaccgccaggtgtgcatcgccggaagtcatattgccttccgctttaatgattccggtcgccagcagacctttttgctcatcggtaaacatgccatagcagcgatcctgtacggtctgaccgcgccaccacgggcacacttcatgcagaacgcgtttgttctcttcgctcaccgcaaagccagcaccgggacgatctgccagatcatcaatctctttttcgatccacgagacagtatattccgggaagatcggcgcggcgcgaacttcgcttgcctggttgccgatgatcaactcatcgtgcttgatccagatagtgcgattcgccaggtgatgtgccagcgccagcgcgcgacgtacagggatcggcttatcgagatgttgctgatacatctcggtatagtgctgcgcgcgctcggtacaaaccggtggtttcacaatatgcaccagcgcatttttgtgcgctttaatgcggtcgctgagcgtgtccagtttcagtgtggtcatggttgttatcctcgtaaggtcgcggttaaccctttctggcaggcatactgctgggcaaagtcgagcagttctggcgcatcaagcggtttttccggggcgtcatagggcagattaagtaagtgatatttgttgatgcccagcgtgtggtagggcaggaaatgaatttcgccaacgtgcagctcgtcggcggcaaaatcggtaatggcttttacagaggtttcgtcggcattaaagccctgaatcagtggcacgcggataatgatttttttgcccgctgcggcgagttttttcaggttatccagcaccctggcggcgttaccgtcggtccactgtttaaacggcgcgtcggcaacgtgttttaaatcggcaagaaacagatcgatatagggcagagaaggggcaatatatttccacggcacatgcagacaggtttctaccgcagtatgaatgccggcctcgtggctggcttgcagtagcgccgtcgccatttccggctgcataaagggttcaccgccagaaagtgttaagccgccgccgctgcgatcgtaaaacggtttatcgcgcaaaacggtcgccatgatctcctcaacgcttttcacttcaccacacacggttaacgcctgtgtcgggcagcagtcggttagcgccgtcagatgctccggggttaacttttcccgatgaataagcaaaccattcaacgcgcgctcaatcacgtccggcgcggccttagcgcacagctcgcagccttccagacacagtcgtgcgtcatacaacagatcctgcgtgcgggcgcggctttccgggttctgacaccagcggcagcccagcgaacagcctttaagaaatacgaccgtgcggataccggggccatcatgggtcgagtagcgctgaatattgaaaatcatagttgcctctctgtttcattcaaacattaaaatactttcgaatgaaagttagattgatgtgcgtcaactgttcagagagttttcccgtgatagtctacattcagacaaaaagtacattttgaggatggttatggaactgtatctggatacttcagacgttgttgcggtgaaggcgctgtcacgtatttttccgctggcgggtgtgaccactaacccaagcattatcgccgcgggtaaaaaaccgctggaggttgtgcttccgcaacttcatgaagcgatgggcggtcaggggcgtctgtttgcccaggtaatggctaccactgccgaagggatggttaatgacgcgcttaagctgcgttctattattgcggatatcgtggtgaaagttccggtgaccgccgaggggctggcagctattaagatgttaaaagcggaagggattccgacgctgggaaccgcggtatatggcgcagcacaagggctgctgtcggcgctggcaggtgcggaatatgttgcgccttacgttaatcgtattgatgctcagggcggtagcggcattcagactgtgaccgacttacaccagttattgaaaatgcatgcgccgcaggcgaaggtgctggcagcgagtttcaaaaccccgcgtcaggcgctggactgcttactgacaggatgtgaatcaattactctgccgctggatgtcgcacatcagatgattagctatccggctgtcgatgctgccgtggcgaagtttgagcaggactggcagggggcgtttggcagaacgtcgatttaaccggacgttctgcatcctcatcaattgctgatgacgtggcagagtgcaccgacgcctgccgcgcctggaaatctgtgcccgaaccgtaggccagataaggcgttcacgccgcatctggcgtctggagcaaatgcctgatgcgacgcttgtcgcgtcttatcaggcctggatgtggcaattactgcacgcacacttcacaccccggattgcgcatcagtttcatttcgcgaaactgacaggtcatcgcatcgtacatgacgattttcccgctggccggtttgccataacctgccagcagtttgatcgcttccattgcctgcaacgaaccaattacgccgatcaacggtgccatcacgcctgcttctacgcaggttaacgagttctcgccaaacaaacggctgaggcagcgatagcaaggctcgccgtcctgataagtgaagaccgtgatttgaccttccatacgaattgccgcgccggaaaccagcggcaccttcgcggcaaaacagcctgcgttcagttgattacgtaccgcaacgttatccgtacagtcgagcaccagatcgtgttcagcaatcaatgctgcaagttctgcgtcatccagcagtgcattgactggcgtaatcgcaatatgtgggttgatccgcgtcagggcgtcacgggcggattctaccttcggttgcccgaccgtagcatcactgtgcagcgtctggcgttgcagattcgagagcgaaaccgtgtcgaagtcgagcagcgtcagggtgccgacaccggcgcttgccagatactgcgaggctgcgcagccgagtccaccgaggccgactaccagcacacgagaatcttttagcgcctcctgaccgtcaaaatcaaagccgcgcagaatgatttgccggttgtagcgcagcatctcctgatcgctgagttccgccattacaggcctccgaacaacgcgttaaacggttctacttccacccattcgcccacttccacattgccgcgatcgcgttccagcacgataaagcagttgccgaggctaaaggagctaaatatatgtgaaccctgatgtccggtggtcgtcacttccagttcgccatcggcgttgcgttgcagcacgccgcgctggaaatcaaggcgacctggcgtttttttcaggcgggacgctgtgcgtacgcgctggcgcgcgggcaggccgctggcggtgttaccgcttagttttgccagcaaaggctgtaccagttgatagaaggtcagcgtcgctgaaaccgggttgcccggcaggccgcagaaccagctattgctgagtttaccgaacgcgaacggtttacctggtttaatcgccagcttccagaaggcgatctcccccagctcttcaagaatcgttttggtgtaatccgcttcacccactgaaacaccgccggaactgatcaccacatccgcctggctgtcggcttcaataaatgcggcgcgcagggcatgtggatcgtcgcggataatccctaagttgattacctcgcatcccaactgttctaacatcaggtgtacggcgagacggttggtatcgtagatttggccgtcgcccagcggctgaccgggcaactggagttcatcaccggtagaaaaaagcgctacacgcactttacgaatcaccggaacttcggcaatccccagtgaagcaattactggcagctctgcggtagtcaggcgagttcccgccgggaaaacaaccgcacctgcagagatatcttcaccgcgacggcgaatattttgcccgctacgcacttcagcagtaaaacgcacgccattgtccgtttgttcagtctgttcctgcatcaccaccgcttcgcagccttcgggtactggtgcgccagtcataatgcggatgcaggtgccagcgggccactcgccatggtaaggctgaccggcaaacgacttcccggcaacgggcagcggttgtccggaggtgatatcggccaaacgtaccgcgtaaccgtccattgcggagttatcaaaccctgggacatccagcggcgaaacgacatcgctcgccagaatacgtccaaaacactgaaccagtggcagcgtttcctgggcggtcagtggggtgacgcgagaaagcatctcattaagcgcggtgtcgagcgacatcaatccggtggtaaattccatgaaaacactcctgcggaggcaaaatcgaatttgcctattatgtcagaaaaacgccacagactgtatgccacctcgggcgtagcgctgggtcctgcctttacatgccatatccatctttctatattcaaaaattgaatgagtaattcataaaaattctgatatttatagcaaaagtggcgagccacccttaatggacgaatactatgggcaaagcagtcattgcaattcatggtggcgcaggtgcaattagccgcgcgcagatgagtctgcaacaggaattacgctacatcgaggcgttgtctgccattgttgaaaccgggcagaaaatgctggaagcgggcgaaagtgcgctggatgtggtgacggaagcggtgcgtctgctggaagagtgtccactgtttaacgccggaattggcgctgtctttacgcgtgatgagacccatgaattggacgcctgtgtgatggatggtaacaccctgaaagccggtgcggtggcgggcgttagtcatctgcgtaatccggttcttgccgcccggctggtgatggagcaaagcccgcatgtgatgatgattggcgaaggggcagaaaattttgcgtttgctcatggcatggagcgcgtctcaccggagattttctccacgcctttgcgttatgaacaactactggcagcgcgcgaggaaggggcaacagtcctcgaccatagcggtgcgccactggatgaaaaacagaaaatgggcaccgtgggggccgtggcgttggatttagacggcaatctggcggcagccacgtccacaggcggaatgaccaataaattacccggacgagttggcgatagtcccttagtgggtgccggatgctacgccaataacgccagtgtggcggtttcttgtaccggcacgggcgaagtcttcatccgcgcgctggcggcatatgacatcgccgcgttaatggattacggcggattaagtctcgcggaagcctgcgagcgggtagtaatggaaaaactccctgcgcttggcggtagcggtggcttaatcgctatcgaccatgaagggaatgtcgcgctaccgtttaacaccgaaggaatgtatcgcgcctggggctacgcaggcgatacgccaaccaccggtatctaccgtgaaaaaggggacaccgttgccacacagtgatgaacttgatgccggtaatgtgctggcggttgaaaatcttaatattgcctttatgcaggaccagcagaaaatagctgcggtccgcaatctctcttttagtctgcaacgcggtgagacgctggcaattgttggcgaatccggctccggtaagtcagtgactgcgctggcattgatgcgtctgttggaacaggcgggcggtttagtacagtgcgataaaatgctgttgcggcggcgcagtcgtgatgtgattgaacttagcgagcagagcgctgcacaaatgcgccatgtgcgcggtgcggatatggcgatgatatttcaggagccgatgacatcgctgaacccggtattttctgtgggtgaacagattgccgaatcaattcgtctgcatcagaacgccagtcgtgaagaagcgatggtcgaggcgaagcggatgctggatcaggtacgcattccggaggcacaaaccattctttcacgttatccgcatcaactctctggcgggatgcgccagcgagtgatgattgcgatggcgctgtcatgccgcccggcggtgctgattgccgatgagccaaccaccgcgctggatgtcactattcaggcgcagatcctgcaattaatcaaagtattgcaaaaagagatgtcgatgggcgttatctttatcactcacgatatgggcgtggtggcagagattgccgatcgggtactggtgatgtatcagggcgaggcggtggaaacgggtaccgtcgaacagatttttcatgcaccgcaacatccttacacccgtgcgctgttagctgctgttccgcaacttggtgcgatgaaagggttagattatccccgacgtttcccattgatatcgcttgaacatccagcgaaacaggaaccccccatcgagcagaaaacggtggtggatggtgaacctgttttacgggtgcgtaatctggtcacccgtttccctttgcgcagcggtttgtttaatcgcgtaacgcgggaagtgcatgccgttgagaaagtcagttttgatctctggcctggcgaaacgctatcgctggtgggcgagtctggcagcggtaaatccactaccgggcgggcgttgctgcgcctggtcgaatcgcagggcggcgaaattatctttaacggtcagcgaatcgataccttgtcacccggcaaacttcaggcattgcgccgcgatattcagtttatttttcaggacccttacgcttcgctggacccacgtcagaccatcggtgattcgattatcgaaccgctgcgtgtacacggtttattgccaggtaaagacgcggctgcacgcgttgcgtggttgctggagcgcgtgggcctgttacctgaacatgcctggcgttacccgcatgagttttccggcggtcagcgccagcgcatctgcattgctcgcgcgttggcattgaatccaaaagtgatcattgccgacgaagccgtttcggcgctggatgtttcaattcgcgggcagattatcaacttgttgctcgatctccagcgtgatttcggcattgcgtatctgtttatctcccacgatatggctgtggtagagcggattagtcatcgtgtggcggtgatgtatctcgggcaaattgttgaaattggtccacggcgcgcggtcttcgaaaacccgcagcatccttatacgcgtaaattactggcggcagttccggtcgctgaaccgtcccgacaacgaccgcagcgtgtactgctgtcggacgatcttcccagcaatattcatctgcgtggcgaagaggtggcagccgtctcgttgcaatgcgtcgggccggggcattacgtcgcacaaccacaatcagaatacgcattcatgcgtagataacattcaggcggagaataaaatggcaagagctgtacaccgtagtgggttagtggcgctgggcattgcgacagcgttgatggcatcttgtgcattcgctgccaaagatgtggtggtggcggtaggatcgaatttcaccacgctcgatccgtatgacgcgaatgacacgttatctcaggccgtagcgaaatcgttttaccaggggctgttcggtctggataaagagatgaaactgaaaaacgtgctggcggagagttataccgtttccgatgacggcattacttacaccgtgaaattgcgggaaggaattaaattccaggatggcaccgatttcaacgcagcggcggtaaaagcgaatctggaccgggccagcgatccggcgaatcatcttaaacgctataacctgtataagaatattgctaaaacggaagcgatcgatccgacaacggtaaagattaccctcaaacagccgttctcagcgtttattaatattcttgcccatccggcgaccgcgatgatttcaccggcagcgctggaaaaatatggcaaggagattggtttttatccggtgggaaccggaccgtatgaactggatacctggaatcagaccgattttgtgaaggtgaaaaaattcgcgggttactggcagccaggattgcccaaactggacagcataacctggcgtccggtggcggataacaacacccgcgcggcaatgctgcaaaccggtgaagcgcagtttgctttccccattccttacgagcaggccacactgctggagaaaaacaaaaatatcgagttgatggccagtccgtcaattatgcagcgttatatcagtatgaacgtgacgcaaaagccgttcgataacccgaaggtccgtgaggcgctgaattacgccattaaccgtccggcgctggtgaaagttgcctttgcgggctatgcaacgccagctactggtgtggtaccgccaagtatcgcctacgcgcaaagttataaaccgtggccttacgatccagtgaaagcgcgcgaattactgaaagaggcgggatatcccaacggtttcagtaccacgctgtggtcgtcacataaccacagcaccgcgcagaaagtgctgcaatttacccagcagcagttagcgcaggtcgggattaaagcccaggtgactgcgatggatgccggacagcgggcggcagaagttgaaggtaaagggcaaaaagagagcggcgtgcggatgttctacactggctggtcggcttcaaccggcgaagcggactgggcactatcgccgctgtttgcctcgcagaactggccaccgacgctgtttaataccgcgttttacagcaataaacaggtggatgacttcctggctcaggcactgaaaactaatgatccggcggaaaagacccgcttatataaggcggcgcaggatatcatctggcaagaatcgccgtggatcccgctggtggtagaaaaactggtgtcggcacacagtaaaaacctgaccggtttttggatcatgccagacaccggcttcagctttgaagacgcggatttgcaataagcaacgcagggagtggaatgcttaattacgttatcaaacgcttactggggttgattccgacgctgtttatcgtctcggtgctggtgtttttatttgtccatatgctgcccggcgatccggcgcgattgattgccgggcccgaagctgatgcgcaggttatagaactggtgcgtcagcagctggggttggatcagccgctgtatcaccagttctggcactatatcagcaatgctgtgcagggggattttggcctgtcgatggtgtcgcgtcgtccggttgccgatgagattgccagccgctttatgccaacgctgtggctgaccataaccagtatggtctgggcggttatatttggtatggcggcgggaattatcgccgccgtctggcgtaaccgttggccggatcgattgagtatgaccattgcggtgtcggggatctcgtttccggcatttgctctggggatgcttttaattcaggtattctccgttgaactgggctggctgcctaccgtgggagcagacagttggcagcactacattttaccctccctgacgctcggcgcggcagtggccgccgtgatggcgcgctttacccgcgcgtcgtttgtcgatgttttaagcgaagattatatgcgtatcgcgagggcgaaaggggtgagcgaaacctgggttgtcctcaaacacgggctacgtaacgcgatgatcccggtagtgaccatgatgggcttacagtttggctttttgctcggtggttccatcgttgtggagaaagttttcaactggccgggacttggacgcttactcgttgactccgtagaaatgcgtgattacccggtgattcaggcggaaattctgcttttctcgctggaatttattcttatcaacttagtggtggatgtgctttacgccgccattaacccggctatcaggtacaagtaaggatgcgactatttaactggcgacgtcaggcggtgttaaacgccatgccactggtcaaacctgaccaggtacgtacaccgtggcatgaattctggcgacgatttcgccgtcagcatatggcgatgaccgccgcattattcgttattttattgattgtggtggccatttttgcacgctggatcgctccctatgacgccgaaaattattttgattatgacaatctgaataacggaccttctttgcagcactggtttggcgtcgattcactggggcgtgacattttcagccgtgtcctggttggtgcgcaaatctcgctggcggcgggcgtgtttgccgtgtttatcggtgcggcgatcgggacgttgctgggcttgctcgctggatattatgaaggctggtgggatcggctgatcatgcgcatttgcgatgtgctgtttgccttcccgggtattttactggcgatcgctgttgttgcggtgttgggaagcggcattgctaacgtgattattgcagtcgccattttttccatccccgcgtttgcccgcctggtgcgcggcaacacgctggtgttgaaacagcaaacctttattgagtcagcacgcagtattggtgccagcgatatgaccgttttgttgcgtcatatcctgcctgggaccgtctcttctatcgtggtgtttttcaccatgcgcattggtacctcgattatctctgccgccagcctctcatttctcggcctcggtgcgcagccgccgacaccagagtggggagcaatgctcaatgaggctcgagcggatatggttatcgcgccgcatgtcgctgtttttccggccctggctatttttctgaccgtactggcgttcaatttgttgggcgatggtttacgcgatgcgctggatccgaaaattaaaggatagttacgtttgaatattgcttgaaagggtaatcacctcacaggaaattattgccctaagcaagtgttgtaactttctgctgattttgtagaatcgggtaatttggttaaaaagccgcagcaagggacaatttttgcagcggcacagcgttcagatagttattttgttaaatgtattaacatgctgagtttatacgaaaagataaagataaggctgataattttatttttattggcagcactgtcatttattggtctttttttcatcattaactatcaactggtatcggagcgcgcggtaaaacgtgccgatagccgctttgaacttattcagaaaaacgttggctatttctttaaagatattgaacgttcggccctgacattaaaggactcactgtatttattaaaaaatacagaggagattcaacgcgccgtgattcttaaaatggaaatgatgccatttttagactcggtgggactggtacttgatgataataaatattatcttttttcgcggagggcgaatgataaaatcgttgtttatcatcaggaacaagtaaatggaccgcttgtcgacgagtcagggcgggttatttttgccgattttaacccatcgaaacgaccgtggtcggtggcttcagatgactctaacaacagctggaatccggcatacaattgctttgatcgtccgggtaaaaaatgtatctcttttacgctacacatcaacggcaaagatcacgatttgttagcggtggataaaattcatgtcgatttaaactggcgatatctgaacgagtatcttgatcaaatcagcgctaatgatgaagttctatttttgaaacaaggccatgagatcattgccaagaatcaactcgctcgtgaaaaactgattatttataatagcgaaggtaattataatattattgattctgtcgatactgaatatatcgaaaaaacatcagcggtgccaaacaacgcattattcgaaatctatttttattatcctggcggtaatttattgaacgcctcagataaacttttttatctgccgtttgcgttcattattatcgtattgctggtggtttatttaatgaccactcgtgtgttccgtcggcaattttctgaaatgacagagctggttaatacgctggcatttttgcccgactcaacggatcaaatcgaggctctgaaaattcgcgaaggcgatgcgaaagagattatcagcattaaaaattcgatcgcggaaatgaaagatgccgaaattgaacggtcaaataaattgctctcactgatctcttacgatcaggaaagcggttttattaaaaatatggcgattattgagtccaacaataatcagtatctggctgtggggatcatcaaactgtgtggtctggaagccgtggaagcggtgtttggtgttgatgaacgcaataaaatcgtcaggaaattgtgtcagcgaattgccgagaaatatgcgcaatgctgcgatatcgtgacattcaatgccgatctctatttacttctgtgtcgggaaaatgtacagacatttacccgtaaaatagcgatggtaaacgattttgacagcagctttggctaccgcaatctgcgcatccataagtctgccatttgtgaacctttgcagggggaaaacgcctggagttacgcagaaaaactgaaactggcgatttccagtatccgtgaccatatgttctccgagtttattttctgtgatgacgcgaaactcaacgaaatagaagagaatatctggattgcgcgtaatattcgccatgcaatggaaattggcgaactattcctcgtctatcaaccgatcgttgatattaacacccgcgccattctgggcgcggaggcgttgtgccgttgggtttctgcggagcgggggatcatttcaccgctgaagttcattaccattgctgaagatatcgggtttatcaatgagctgggttatcagattattaaaacggcaatgggtgaattcagacattttagtcagcgtgcgtcgctgaaggatgatttcttactgcatattaatgtttcgccctggcagttaaacgaaccgcactttcatgagtgttttaccaccatcatgaaagaaaatggcctgaaggcgaacagcctctgtgttgagatcactgaaaccgtgatcgagcgaattaatgaacatttttatctcaatattgaacaactgcgtaaacaaggggtacggatatcgattgatgactttggcaccggtttgtcaaacctgaaacgtttttatgaaattaatccagacagcataaaggtggactcgcaatttaccggcgatattttcggtactgcgggaaaaattgtgcgcattattttcgatctggcacgctataaccggatcccggtgattgcggaaggcgtagagagcgaagacgttgcgcgcgaattaattaaattaggatgtgttcaggctcaggggtatctgtaccagaaacccatgccattctccgcctgggataaaagtggaaaattagtaaaagagtagtttacgtatgtccagaatcaataagttcgtacttacagtcagtctgctgatttttatcatgatttcagcagttgcctgcgggatctacactcaaatggtaaaggaacgggtgtatagcctgaaacagtccgttattgatactgcttttgcggtggcaaatattgctgaatatcggcgtagcgtggcaattgatcttatcaacacgctaaatcccacggaggaacagctgttggttggtttgcgcacagcttacgccgactcggtttccccctcttatttgtacgatgtcggtccttatctgatttccagtgacgaatgtattcaggtaaaggagttcgagaaaaattattgtgcagatattatgcaggttgtgaagtatcgacatgtcaaaaatacagggtttatctcttttgacggtaaaaccttcgtctattacctctatccggtaactcacaatcgtagtctgatatttttgcttggtctggagcgtttttctttactgtcaaaatcgctggcgatggacagcgagaacctgatgttctctctatttaagaacggtaaaccggtgaccggtgatgaatataatgctaaaaacgccatcttcaccgtttcggaagcgatggagcacttcgcctatttgccgaccggattgtatgtatttgcgtataaaaaagatgtttatttgcgggtttgtacattgattattttctttgccgcattggtggcagtgatatcgggtgccagttgcctctatctggtacgcagagtgattaatcgtggtattgtggagaaagaagccatcattaataaccattttgaacgcgtactggatggcgggcttttcttttcggctgccgatgtcaaaaaactctacagtatgtataactcggcgttcctggacgacctgaccaaagcaatgggcagaaaatcctttgacgaagatttaaaagcgctgccggaaaaaggcggttatttgtgcctgtttgacgtcgataaattcaaaaacattaacgacaccttcggtcatttgctgggcgatgaagtgttgatgaaagtggtgaaaatccttaaatcacagatcccggtagataaaggtaaagtctaccgcttcggcggtgacgaatttgcggtgatttatacgggtggaacgctggaagagttgctatcgattctaaaagaaatcgttcatttccaggtgggaagcattaatttaagtaccagtatcggtgtagcacattcaaatgaatgtcctaccgtcgaacgcttgaaaatgctggcggatgagcggctgtataagagtaagaaaaacggcagggcacagattagctggcagtaatcattattcgcaggccggacaaatgattttgcccggcctgaattaattaaacccggctaccccacaaatcgtactcatcggcgtgctcgactttcacacgcaggatatcacccggcttaacgttggtttcaccattgagataaaccgcgccgtcgatttccggtgcatctgccatgctgcgaccaattgcgccttcttcgtccacttcgtcgataatcaccagaatttcacggcccactttctcttgcaggcgctcggcggaaatctgctgctgcagctgcatgaaacggttccagcgttcttctttcacttcttccggaacctggtcaggcagggcattggcgtctgcaccttcaaccgggctgtatttaaagcagccaacgcgatccagacgcgcttctttcaggaagtcgagtagcatctggaaatcttcttccgtctcgccagggaagccgacaataaaggttgagcgtagggtcagttccgggcagatttcgcgccactgtttgatgcgcgccagttggcgatctacagaacccggacgcttcatcagtttgagaatgcgcgggctggcgtgctgcaacggaatgtccagatacggcaggattttgccttctgccatcagtgggatgacgtcgtccacatgcggataagggtaaacgtagtgcagacgtgtccagatccccagtttcgataactgttcgcacaggctgaccatgctggtttttaccggctcgccgttgtggaagccagtacgatgtttaacatcaacgccataggcggaagtatcctgcgagatcaccagaatctctttaacgcccgcatctaccagacgtttcgcttcacttaacacttcgccaatcggacggctcaccaggtcgccgcgcatagacggaataatgcagaaggtgcagcggtgattacagccttcagaaattttcagataggcataatgacgcggcgtcagtttcacaccttgttctggcaccaggctcaggaatgggttgtgtttcggtttcggcacgtagtgatgaacgtgctccagaacctgctcatagctatgaggcccggtgatttccagcactttcgggtggacttcgcggatctgatcttcttttgcccccagacaaccggtcacaataaccttgccgttttcattcaacgcttcaccaatggcttccagtgattcttgtaccgcgctgtcaataaagccgcaggtgttgacgatcaccatgtccgcatcgtcatagctcggtaccacgtcataaccttcagtgcggagttcggtgagaatacgctctgaatcaacaaggtttttcggacagccaagggaaacaaagccgattttcggctggggagttactttgctcatagcttaaaaaatattcagttacaggaaaggtcagggcagggattctacagagttctggataaaatttgtatcgcaatctcattcgctggcggaggcgaaggaaatgtaaattttgttaattcggcgtgaataattgatcctggacagcattttgctcaaaaaatagccatactatttaattgcaacaaggctggaaagaggaggatcgaagtatgttcgttgacagacagcgaatcgatctgctgaaccggttgatcgacgcacgcgttgacctcgccgcatacgtgcaactgaggaaggcaaaaggatacatgtccgtcagcgaaagcaatcatctacgagataacttttttaaactgaatcgcgaactgcacgataaatcgctgcggttgaatcttcatctggatcaggaagagtggagtgctcttcatcatgctgaagaagcattagcgacagccgcagtatgtttgatgagtgggcaccatgattgcccgactgttattaccgtcaacgccgataagcttgaaaattgtctgatgagcttaacgctgagtatccagagcctgcagaagcacgccatgcttgagaaggcctgaaaactaagggggagaaagcgtctcccccttcatgtttaagtttttgtaaaaatgaatttgttatctcctccactgactacgctttaagccagagtcaatccggaggcgttatgcatcgacaatcctttttccttgtgccccttatttgtctttcttccgctctctgggcggctcctgcaacggtaaatgtcgaagtactgcaagacaaactcgaccatccctgggcactggcctttttacccgataatcacggtatgttaatcactctgcgcggcggcgagttgcgtcactggcaagcaggaaaaggattatctgcgccgctttccggagttccggacgtttgggcgcacgggcagggcggcctgctggacgtggttttagcgcctgattttgctcagtctcgccgcatctggttaagttattccgaagttggcgatgatggcaaagccggaactgctgtgggttatggccgcttaagtgatgatctctcaaaagtgaccgacttccgcaccgtctttcgccagatgccaaaactgtctaccggcaaccattttggcgggcggctggtattcgacggtaaaggttatctttttattgctctgggcgaaaacaatcagcgcccgacggcgcaggatctggataaattacagggcaaactggtgcgtctgaccgaccagggcgaaatcccggatgataatccttttataaaggaatccggtgcgcgcgccgagatctggtcttatggcattcgtaatccgcaaggaatggcgatgaatccgtggagtaatgcactgtggctgaatgaacatggcccgcgcggtggtgatgaaattaatatcccgcaaaaaggcaaaaactacggctggccgctggcaacctggggaatcaactattcaggctttaagataccggaagcgaaaggggagatcgtcgccgggaccgagcaacctgttttttactggaaagattcgcccgctgtgagcggcatggccttctataacagcgataaattcccccagtggcagcaaaaattatttattggcgcgctgaaagataaagatgtcattgtgatgagcgtcaacggcgacaaagtgacagaagatggccgtattttaacggacagagggcagcgaattcgtgatgttcgcactggacccgacggttatttatacgttctcaccgacgagtccagtggggaattacttaaagttagcccacgcaattagctaacgggaatcatcaccactttgcgcactgcggggcgttcagtgagttgctgataccagcgttgcagatttggacgcggtgtccaggtcaggccaacgttaaacaaattgtagatgaacggtgcgatagcgatatcgcccacaccaaactcgtcgccagagaaccattttacttttgccagttccgcatcgagcagggcaaacagggcgtcgcactctttgcaactggcatcaatggcggcctgatcgcgctcttccggtggtgttctgactaatcccatcaggatcccgcgatgagcattactgagcgtctggtttgcccagtccatccatttttccgcttccgcacgacgtgccggtgagtcgatccacaggcgtttttgcccgtactgtgccgccagatagcggacaatggcgtttgattcccaaagaatgagatcactttcgtcgtcacgcaacaacggcaccagcccgttagggttcatcgccagaaaatcagcatcgtgatttatcccaaactcacggcccgcgagaatttgctcataaggtagttccagttcttcgagcgtcagcaatactttttttacgttagttgaattattccgaccccacagcgtaatcatactcaccccttttccgacaggcagccacaggctgaacaggactccgatggtgaagtaaagttaacttttaagcaacagctggcaaaaaaatgacaccagaagcagcgaagcggcaggatattgcataaactttaaaaactttaccaacttacggtttctttaagtttgtgtgtgcgttattaatcaccaaacttatcatacggcgatataacgtatttttttgaatggatactcgggtggcatttatgacgcaatactcctctctccttcgtggtcttgcagcgggttctgcatttttattcctttttgccccaacggcattcgcggcggaacaaaccgttgaagcgccgagcgtggatgcgcgtgcatggattttaatggattacgccagcggtaaagtgctggcagaaggcaatgcggatgagaaactggatcccgcgagcctgactaaaatcatgaccagctatgtggttgggcaggcgcttaaggccgataagattaaactcaccgatatggtgacggtcggtaaagatgcctgggcgacgggaaatccggcactgcgtggttcatcggtaatgttcctcaaaccgggcgatcaggtttcggtggcagacttgaacaaaggtgtgattatccagtccggtaatgacgcctgtattgcgctggctgattacgttgccgggagccaggagtcatttattggtctgatgaatggttatgccaaaaaactgggtctgaccaacactaccttccagacggtgcacggcctggatgcgccggggcagttcagcaccgcgcgcgatatggcattgctgggtaaagcattgatccacgatgtgccggaagagtacgccattcataaagagaaagagttcaccttcaacaaaattcgtcagcctaaccgtaaccgtctgctgtggagcagcaatctgaatgttgatggcatgaagacaggaaccacggcaggcgcgggatataatctggttgcttcggctacccagggcgatatgcgtttaatctccgtagtgttgggggcgaaaaccgaccgtatccgttttaatgagtctgagaaattattgacctggggtttccgcttctttgaaaccgtgacgccaattaaacctgatgccacctttgtgactcagcgcgtctggtttggtgataagagcgaagtgaatctcggggcaggtgaagcgggctcagtgaccataccgcgtgggcagctgaaaaacctgaaagcgagttatacgttaacggaaccgcagcttaccgcaccgctgaaaaaaggtcaggttgtcgggaccattgatttccagcttaacggtaaatccattgagcagcgtccgctgatcgtgatggaaaatgtggaagagggcggattctttggtcgggtgtgggatttcgtgatgatgaaattccatcagtggttcggcagctggttctcttaatcttctgataaccggatggcgcgaaacgtcatccggttatacgtcattaatacatcaacttaatgcgctgcgtctgcgcgtacttcacatactcatcttccgggcaacaatcgctcaccacaatatcaaagcgtttcaggtcacccatgcgcgccggacgcaccttgccaaatttactgtggtcgacaaccagcacatgcttttgcgccatcgacatggcccagtgttttaccggcaactcttcaagattaaaacaggtagcgcctttactgacatgcacgcccgccgcagaataaaaagcgatatccgggcaaaaattattcagcgtttgctgaaaatcgatgggtttgaaaatggcgttgctggcgtgaaattcaccaccgcaaagaaacgcgcggcaatggggtttctctttcagcgccagaaaggtatttagcgaataacaaacggcggtaaaagggatttcattatcaatcgcttcaataatccacggcgtggtggtgccacagtcaaaaaagagggtctgatcgggttctaccagcgtcgcagccagttttgccgcccggcgtttttcttccaccaggcgggatttttgatcgcttaacaggtaatggctggcactgcgcggttccagaacaatatagccgccgagcaaaacgacgggcgcactgtggttgttcagatcgcgacgaatcgtcatctccgaaaccccaagcagggcggcggcgtctttaagatgtaacttatcgctgcgttttaattcttgcagcagctgcccgatacgctcttcgcgacgtgtttccataatccctctgaatagttattgaagcgagccgctcaatactacactttttagcagagatcagtcacgcacccagcctttgcggatcggtaatgcaaaacagacgcgataccacgattgcagacgttgatagagtttatgccccatcgcttgccagataatctgggcactaaggcagccaatcatacctgccagcaatccaccgagcatatccagcggccagtggacgccaagataaacgcgcgaccaggcaatgacgacggccagcaccattaaaagtgagccggaccacaggcgatgccagcataaaaatgccagtgcaaaggtgaaaatcaccgtaccgtgatcgcttgggaatgagtcatccgccgcatgatgcaggaagttatagccgatattttcgacaaagggtcggtcgtgcggaaaaagatgtcccatcgtccaggacacaaacaggctgaccgccagcgcgatagcgatttttatcaccagttgccgttgtgctgtaagcccccacaaccaaagtaccacggccagcaacggcaccacggtaatcaaatctttagcaataaaaatcgccaacgagatcatccacggagccgagtctggcgtcgcgttaataagagagaatagagagagattcaaattttccagcataacttcccgacgcaaagtgattaaaagggagccaatacaggcaagtcgttgagaataaagtgcaggttaaactgggtaaagcggcatcgtcttatttccctcaagcggcctgtttacggtgggtgattgtaacgggcataggttaaataaaacttaaagaaagcgtagctatactcgtaataatgtaagaatgtgcttaaccgtggtttcagctacaaaattcgctttctcgttagctgcgcttttattaaactctgcgcgattattattggcgaagaaattgcatgcaaaataaattagcttccggtgccaggcttggacgtcaggcgttacttttccctctctgtctggtgctttacgaattttcaacctatatcggcaacgatatgattcaacccggtatgttggccgtggtggaacaatatcaggcgggcattgattgggttcctacttcgatgaccgcgtatctggcgggcgggatgtttttacaatggctgctggggccgctgtcggatcgtattggtcgccgtccggtgatgctggcgggagtggtgtggtttatcgtcacctgtctggcaatattgctggcgcaaaacattgaacaattcaccctgttgcgcttcttgcagggcataagcctctgtttcattggcgctgtgggatacgccgcaattcaggaatccttcgaagaggcggtttgtatcaagatcaccgcgctgatggcgaacgtggcgctgattgctccgctacttggtccgctggtgggcgcggcgtggatccatgtgctgccctgggaggggatgtttgttttgtttgccgcattggcagcgatctcctttttcggtctgcaacgagccatgcctgaaaccgccacgcgtataggcgagaaactgtcactgaaagaactcggtcgtgactataagctggtgctgaagaacggccgctttgtggcgggggcgctggcgctgggattcgttagtctgccgttgctggcgtggatcgcccagtcgccgattatcatcattaccggcgagcagttgagcagctatgaatatggcttgctgcaagtgcctattttcggggcgttaattgcgggtaacttgctgttagcgcgtctgacctcgcgccgcaccgtacgttcgctgattattatgggcggctggccgattatgattggtctattggtcgctgctgcggcaacggttatctcatcgcacgcgtatttatggatgactgccgggttaagtatttatgctttcggtattggtctggcgaatgcgggactggtgcgattaaccctgtttgccagcgatatgagtaaaggtacggtttctgccgcgatgggaatgctgcaaatgctgatctttaccgttggtattgaaatcagcaaacatgcctggctgaacgggggcaacggactgtttaatctcttcaaccttgtcaacggaattttgtggctgtcgctgatggttatctttttaaaagataaacagatgggaaattctcacgaagggtaaaaaaatgcctgactgctttgtgcgatcaggcattctcgaattaatggtgatggtcgtcaatctggtgttcgataaccatcccttcacctacgctggcaagatggcgaacataaggatgcgggcggtaagccggagctggcgcaggagccacatagacggtttgcggcacagtcgcgacgctgaccgcttgtggaacgctgactgaatcaggaaccacaaccactttgtatccactcggcacatcgacggtgacactttgcgccatcgccacaccagtaaagcccattaaaagcgcgcccaacagtagacaatttttcataatcatttcgcctgaaataatgcagcgggttaatttccgcgaattatgcagccttcattcaggcattgtgttgccgggcgtgctgccggttttattggtcaaatggcgcttcgtgtttaagaactttatcgatcacatccagtacgccttcacggttattggagcctgcgcggtattttgccgctgcgacgaccgcgctaccggcattttccattgcaaaactaaagcctgcctgacgcagcatctcaatatcgttaccgccatcgccaaagaccaccacttcgctgtcgtctattccccataatttctgcagttggcgaaggccattggctttatgtacgccggggataatcagatcgatgctgccgttgccggtgtggaccgacaccataatatcgccgatggcctcatgtaatgctttttgtacttgtggaatcagttcatcggaaagattcaggccaaacttaaagaagatatcctctaagttgtcaaagttatcgacgtattccagacggtgataatacatttccgccaccgttttcatggcatcgtcatattttttgagtgtataggcactattttttccgcaggcaataatttccacttccgggcgcgtcagcaaatgttccacgacagtagcaaacgcatccttcgatagctcgccattaaaaacatctttgccttcgctcactacccagccgccgttttcagccacaaaggcaatttcattagcaatttcagggaagaaagagatcaactgataatattgattcccgctggcgactacaaagcgaattccttgtgctttcatttgctgatactgagccataaaccgctcacggttataggttttttgatcgcttaagaaagtaccatccatgtctaccgcaattaatttaatgctcatcaactattctccatcgccgtctgcgttttggtatcgggtttggcgacggctttcgcgacaatagccgcgagaataaccagcgccagtacaaccagcattgcactacgtaatccataatgttcgccgagatagcccagcagcggcggcccgacgaggaaagccagataaccggtcgttgctaccacactgacgcgggttggtgcatcggggccggtatcgctggcggcagaaatggtcagcgggaagcccagcgaggcacccagtccccagagtacaacagacaccccagcgacccaggcgctatcgacaaaaataatcagcccaatacccaacgcccccattagtgcactggcccgaaccacggcaacgcgactgtaacggtcgatgaaccaaccgccggtgaagcgtccaacggtcatccccagggtaaaaccggcataaatcagcgagccggaagtagggctaaaaccgtgaccgtcaaccattaataagggtaaccagtcgttggcagaaccttcggcaaaggccatcgccagcaccacaacacctatcagcagcaactggatatcgcgataaaaaggtacgcctttttcgccatgctgggtgccatcggcagcatttttgcccgtaccgtcagggattgcctgaatggcgatataaataggtgcgatacctaccagcgccgccaataaaatgtgcaccgttgccggaacgccaaaggccgtcagtgccatcccgacacctgcgcctgccagcgtgcccaggctataaaaaccgtgcatcatcggcaaaaccgtcttattcatttctcgctcaacggcagcaccttcaacgtttatcgccacttccgcagaaccaaaacttgccccaaagacgccgagaccaacggcaaagagcaggggcgatgtcagccagagtgccagacttaatatcatcatcccgatcaatgcgcaggacatcgtgaccaggatgacattacgtgtcccaaagcgtttcactaaccatgccgagcagagaataccgctcatcgaaccgatcgacagaccaaagagaacaccgcccatttcagcgatcgagacagagagaatatcgcggatagcaggcgtacgggttgcccaggacgccattaacaggcctggcaaaaagaagaacataaacagcgcccaggttcggcgtttcaatgcattacgtgaagaatttacggtcatagatcacgtcaaaataagaagagggaagacaacattagcaaggttgtgtacatttgtacacaattgcagagagaggaaatgacatgcgtcgcgctaacgatccgcaacggcgagaaaaaattatccaggccacgctggaggcggtgaaactttacggaatacatgctgttacgcaccgcaaaattgctacccttgccggggtaccgttgggatcgatgacctactatttttcaggaattgatgagttgttactggaggcgttcagcagttttactgagatcatgtcccggcaatatcaggcattttttagcgatgttagtgatgctccgggcgcatgccaggctatcaccgatatgatctacagctcacaggttgcaacgccggataacatggagctgatgtaccagctctacgcgctggctagccgaaaaccgctattaaaaacggtaatgcaaaactggatgcagcgcagtcagcaaacgctcgaacaatggtttgaacccggaaccgcccgcgcgcttgatgcgtttattgaggggatgacgctgcattttgtcaccgaccgtaagccgctatcgcgcgaggagattttgaggatggttgagagggttgcagggtagtagataagttttagataacaaaaaacccatttatgtaaacgggttaatgaaaacaataagttagagtaaaaacaataagttgggttggtggtcagtggtggttattacggggtaatgccaaccgctgccgccactttgtcgccatttggaacaacccggttgtgctgccaatttgcatgctaacggatagaaccatcaggatataagtacacgccaccctctagatacattggctcaccatcttcaactgcaatatcttgataaagttcagccagttcattagattcattttttacaagattatatgtatcaacatcatacccaaggatttttaactcatcatctgaggttgctccttgtttttgcttaagcgcaacaatatcaaaaatccactttttgccatctttaacgtagtacgccccagaatcataaccacgatcgtcaagtactttttcaaatcccatcgataatgcttttttgacagtatgtttttttacggtaatgatagccatgtaatctcttaatatattgaataaaagtgaacttatatactgataaaagtttactctgacgcaattaactcagctagtgggggatgatgttatttttgcaccagtagatcacacttctagcgttgcgagggggttgaatctcagagccgtctcaagatgatcgggtgctaaatgggcatagcgcatagtcatttttatatcgtgatgtccgaggattttttgcaaagcaaggatatttccacccgacatcatgaagtgcgccgcaaacgtatggcgcagaacgtgtgtcagttgaccgcgagggagcacgatagacgttttttccatcacggataaaaattgaaaatagcagtctgtaaagaaattgaacccatcaagcgccatgatctcttcgtaaagctctttactgatagggatgcttctgtttttcttccccttcgttcttacaaaggtaattcggtatttggtcacttgcgagcgggtaagatttattgcttctcgccagcgtgcgcctgtgcttaggcatatcttgactaccagtgccagaattgggtcctgacgtttgcaatcagccagcagttcaacaatctgctcatgggtaagccatgccatctctttttctgcgatggtgaattttcgcatgttctccagtgggttcggatacgaccattcgcccaggcgggatagttcgctaaaaacactacttagatagctttgctccaggttaatggtgaccgggcttgctcctttcttccatttctcgctgaagtagatctcacctgtcaggcgtttatctcgatagtgggcaaacattttagaggttagatcagttgcaaggggattgcccagagcgtcaaccatcaacagcagtttgtcatagacatgctgcccagctgtcagagatttaccatgtagtttgaaccatagctcaatcacgtctttcaatgtccgacgatccactgattcgcccagccagggctttgcttcggtttcttccatcgtgtgacgctcaaaagccagagcttcgcctttggtggcgaattgtttacgcacacgacgtccactacgtccggcggggtaacattcgcaaagccattttcctgtagtgagttttcgtactgccataaaaaatgccctccagtagagagcatttttactgtatgtataaccagtgtcaatgtatgaaatcctgcgaccatacatctcactgaagccataatgaagttagctattttttgctatgtgagtatgtgacttttgcggttagcctgcggctcattgttatattaggcgcagatataaaagcaaaatttatcgcgagtttttagtacagattttttttgatttactaatagttccatcattgcaaacgaactttccatcggaggtacagtgagagacacctccctttttcccagaacaaggataatttttagcataggtagttagtgggtttaataacaaagagcatgataaaaccacaaaaaataccttaccaagcatagtttcctcccggtattacctaacgtacttaattgttaaacttataattttcccaattatttcaacatcttctatcttgcactcgaaggctctgtttccaccctcgacgaagattcttccaccgggtaaacgagtaatgtcacggatcgttatttcgccatcaatacttattacccatttaccatcacgtatatcatcaaattccttatcacaaataaattcagaattattatctgtgattacaaaaagattcttgaatgccgacggtagaaattctctatcgaaaatataaaaaccgtcttcacacaaggccccatcagataatacatatttagcaacttccatagtatttgtattacctgaagtttgctttgaaccatgcccggttgtgagccaattaagtgaggtgcctgtttcaagggcgcactggattacccattctgctgggaatgagtcacgcatgtagcgtgtggcgagtgtacttttagagattcctaaatgatcgcacaacgcctgtcgagtcttgaatccataagcttctaccatgcgctctatagcgcctcgtccgcctttctccaaattcatggtcactccaagtgaacttttatcttgacgatttcactgtgcgatcgtatgtttatggtgttcacaaaatacaaacgatccgtattcgtcctgattaatcatcattaaacgaggaatgttgcatcatgagacctaacatttcaatcactcttaccacgcctcatgtgactattgaacgctatagcgagttgacagggctatccatcgataccatcaatgacatgttggctgatggacgccttatccgtcaccgtctgcgcaaagataaaaaacgcgaaaaagtgatgatcaacatagcagcaatgaccgttgatgcgctttcagaatgcaatctaaaccttaattagttcgattctgaaatacatcagaggcattgaccatgtttgattaccaagtttccaaacatccacattttgatgaagcctgtcgtgcattcgcattgcgccacaacctggtgcaactggcagaacgtgctggcatgaatgtgcagattctgcggaacaagttgaacccagctcaacctcatttattaaccgcaccagaaatctggctgcttaccgatctgactgaagattcaacgctggtagatggttttctggctcagattcactgcctgccatgcgtaccgattaatgaggtggcaaaagagaaactgccacattacgtcatgagtgcaaccgcagagatcgggcgtgttgctgcaggtgcggtatctggcgatgtaaaaaccagtgcaggtcgtcgtgatgctatcagcagcattaactctgtaacacgactgatggcgttggctgctgtttcattgcaggcccgtttacaggctaaccctgcgatggcgagtgcagttgataccgtgactggcctcggtgcttcattcggtttgctgtgaggtgcttatgctgacgaaagaaccatcatttgcatcgctgctggtaaagcaaagcccggcaatgcactacggtcacggctggatcatgggtgaggatggaaaacgctggcatccgtgccgttcacaagatgaattgctggcagaactatctacgaaaaaacgggggaacaaatggctattgaaggcgctgcggcgactgttccattaagacccggtgaacgcctgaatggacttaatcatattgcggagttaagggcgaaagtttttggtttgaatattgagtcagagcttgagcggtttattaaagatatgcgtgatccacgggatatcaataatgaacaaaataaacgggcactggctgccatattctttatggcaaaaattccagctgaacgtcatagcatcagcattaatgagctgaccactgacgaaaagcgggagttgattaaagcaatgaatcattttcgtgcagtggtgagcttatttcccagacggctaaccatgccgaattaaccaactaatgaaattaatggcgtaaacccgccgggcatccctttatctaaattcaggagaattgcttatgcgtaatattgaaaccctcacgaccaaaaccggaccggatgatgcaggtcttaatcttttactgacagaggctcgtctggaagaacgccgggcaagggctgaagcaatggctgctcgcctcgatagcctggcgtgtcatatcacctcccgccagctaaaccacgtcgaagcggcagaactgctgcgtgtgactgctgaagcaatccagaacgaagcgcaggagatccactgatggctgatgcaatggatctcgtacagctgcgcgttgaagaagaacgccaacgccatatccgtgctgcccgttccaaaacgccgggcgtgtcccgcgtgctttgcgttgagtgtgaagcgccaattccgccagcacgccgccgtgccattcctggagtgcagctttgcattacctgccaggaaatcgtagagctgaaaggcaaacattacaacggaggtgctgtatgagcaccatcctgaaatgggcgggtaataaaaccgccattatgtccgaactgaaaaaataccttcctgctggcccgcgactggttgaacctttcgcgggttcttgtgctgtgatgatggcgacggattaccccagctatctggttgcggatattaatcctgatttaatcaacctctataaaaagattgccgctgattgcgaagcgtttatatctcgtgccaaagttttatttgaggaagcaaacagtgagctggcttattacaacataagacaggagtttaattactcaactgaaattactgatttcatgaaggcgatatatttcctgtatctcaatcgtcacggttaccgtggtttatgtcgctataacaagagcgggcatttcaacattccctacggtaattataaaaatccgtatttccctgaaaaagaaattcgcgcatttgcagaaaaagcccagcgggcaacgtttatctgcgccagctttgatgaaacgctggcgatgttgaaggcgggggatgtggtgtattgcgatccgccgtatgacggtacgttttccggctatcacactgatggtttcactgaagatgaccagtatcacctggcatccgttcttgaacatcgagcatctgaaggacatccggtcattgtttctaacagtgacacgtctttgacccggtctctttatcgtaatttcactcaccactacatcagggcgaaacgcagcatcggcgttgcagcgggggagggaaaatttgcaacagagatgattgccactaaatctgctaattggtttagtgccgattttagtaggggacgtgactctactgttattttcggggtgcaagtgtgaaagaaatgcaccacggaattcatcatttccatgggacgcctgtctggggaagtgctggcgacgttcatcgtattgcggtgagcggagctggcgctttcgtctcctatgtacgaccagatcagattgcggcgtccattcagcacgctcaggtcgtcggcattgataacggcgcattttctgcatgggtgcgtgggctaaaaattaactggagtgatttttataaatggctcctgaactattaccaccatcctaaggtcgctttttttgtcattcctgatgttgtagacggcggtgaacgtgacaatgatgccctgataaacgaagttccgaaaatgttctacgggaaggcaactcccgtctggcatctgcacgagtcaatcgatcggcttatcgagctatgtcgtgaatggcctcgtgtctgctttggatcgtctggtgaatatgcggctatcagaactgcgcactggcatcgtcgtatgcaggacgcttttgaagcaatttattgccgacacaatttcaaaacagctgttcatggtttgcgcatgcttgacggtcgtgtgttgggaaattacccactggcgactgccgacagtacaaatcttgcctgcaatgtccccaaatttaatagcaaatatcctgagcttacgcgggctattcaggaggctgagtattcgcgcaatctgacggaaaaggagctgaaagctgtcattctgaaaaaccgttgcgcaattttaaaaggtgcaattgaagctgttcgcccaccttcagtttctgattggctgtcgaatggtttgcagccttcacagctcgaactggagattgcgtaatgaactacagctattcctggaatgctgagaaaaaagcaatcaatccttacgtagggacagaagagcaatcttcagtttctgcgctttcaaacctgatcgctctgtacgctgccgataacgagcaggaacacctgcgccgcgaggtactgagtgatcaggtctgggagcgttatttctttaatgaatcccgtgatcctgtccagcgcgaaatggagcaggataagctcattagtcgggcaaagctggcgcatgagcagcagcgttttaatccagatatggtcattctggcggacgtcaatgcccagccttcccatatcagcaagccgctgatgcaacgtattgaatacttcagcagcctgggcaggccaaaggcttattcccgctatttgcgtgagacgattaagccatgtctggaacgactggagcatgtacgcgacagtcagctatccgcttcttttcgctttatggcaagccatgaagggctggatggcctgcttatcctgcctgaaatgagtcaggatcaggtgaagcgcctgtctacccttgtcgctgcgcatatgagcatgtgccttgatgcagcttgtggtgatttgtatgccaccgatgacgttaagccagaagaaatccgcaagacatgggaaaaggtggcagcggaaaccctgcgtctggatgttatcccgcctgcgtttgagcaactccgtcggaaaagaaaccgccgtaaacccgtgccctatgaactcattccgggttcgctggcgcgtatgttgtgcgccgactggtggtaccggaaattatggaagatgcgttgcgaatggcgggaagagcagttgcgcgctgtctgcctggtcagcaaaaaagcatctccttatgtcagctatgaagccgtgatgcataaacgtgagcagcgccgtaagtcgctggagtttttccgttctcatgaactggtgaacgaagacggcgacacgctggacatggaggatgtggtaaacgccagcagcagcaaccctgcgcatcgccgcaatgagatgatggcctgtgttaaaggtctggagcttatcgcggaaatgcgcggtgactgcgccgttttctacaccatcacctgtccgtcacgtttccattccacgctaaataacggcaggcccaacccaacctggacaaatgcgacggtaagacaaagtagtgattacctggtcggcatgtttgctgcatttcgtaaggcgatgcacaaagccggattgcgctggtatggcgtgcgggtggctgagccgcatcatgacggtacagttcactggcacctgttgtgttttatgcgcaaaaaagaccgccgcgccatcactgcattactgcgtaagtttgccatccgtgaagaccgcgaggagctgggcaataacactgggccgcgctttaagtctgagttgattaacccgcgcaaaggtacgccaacaagctacatcgcgaaatacatcagtaagaacattgacgggcgtggtctggctggcgagatcagcaaggaaacggggaaatccctgcgtgataatgctgaatacgttaatgcctgggcgtctctgcatcgtgttcagcaattccgcttctttggcattccggggcgtcaggcttaccgtgaactgcgattgctggctggtcaggcggcaaggcaacagggggacaaaaaagcaggtgcgccggtactggataacccgcgccttgatgcaatcctggctgctgctgatgctggttgttttgccacctacatcatgaagcagggcggcgtactggttccccgcaaatatcacctgatcagaaccgcttatgaaatcaacgaagagccgaccgcctatggcgatcacggcattcgtatttatggcatctggtcacccattgcagagggcaagatctgcactcatgcagtgaagtggaaaatggttcgtaaggccgttgacgttcaggaggcggcagccgaccagggcgcttgcgccccttggactcgtggcaataactgtccccttgctgaaaatttgtaccaacaagggaaagacaaatcagctgatggggataccagaacggatatcacccgcatggatgacaaggaattgcacgattacctgcacagtatgaacaaaaaagagcgccgggaactggctgcaaggttacgcctggtgaaaccgaaacggcgtagagactacaaacagcgaattacagatcatcagcgacagcagctcgtctatgaactgaagtccagaggatttgatggcagcgagaaagaggtcgatttactccttcgcggtggcagtattccgtcaggagcaggcctgcgtatcttctatcggaaccagcgtttgcaggaagatgataagtggcgggatctgtattaattacgcgggttaacaattcgtgctcttaataataccaggcataccaggctgatgaacgtaaaaaaacgttttacatcagtaagattattatatactgtaaatataaacagtggttatgtatacagtattgctttggtgtcataggaggaaagatgcaggactattttttggagtctttgaagctccagcgcattgatttttttcttaagcttgtagcggctagtgagtgtagtgatgaagagaaggggctggccctgcagtgggtttctgaactgacagatgaactcatggcaaaaatcagaacccatgaatacaaccgctcaatggatgtcatcagctgaggtgacttttatgcgcattgaaataatgatcgataaagagcagaagattagccagtctacactggacgcccttgaatccgagctttaccgcaatctgcgccccctgtatcccaaaacggtaattcgtatccgcaaaggtagctctaacggtgtggaactgaccggactgcaactggacgaagaaagaaaacaagtgatgaaaattatgcagaaggtctgggaggacgacagctggttacactagcgaacgttgcggacgataaaactggtttttatcgtccgcaaggttgaacaacgagccgcgtgaggcgttagaaacgggtagtgaaaagtgatttaagaatgccttgttcccctgaaactttggcctatgcaacaacattcgacagctttcttgattatcataagtaacttgaagtttagggacgattctgatggtatacgtgaaaaatgtatcgtgtgttgctttggcaaaaaggagttttagtggacaacggctcaatcaccttctttgatattactgcttgtgggttttatcgtttaaagaataaacccgaagagcttgattataaattcggcgatcttatgggggttttggacgatttagaagggtgactcaaggataaaaattttgagcagactctcccatggaataaagaagaacaacctctgcgaacacgagtttacagtcgaggccttgtgagggacagccagactaaagatgcagtaattgttttataccgtgaagtggggaacggtaacggaatacatggtattaaggtcggttctaaagtaagtggtgatagtaaaggaaccattagggcgggaagagaacatggtgaggataaaataatttggggtgaaccctgctattactggattattcctgagttgaataaaatagcatcaatcagattcccccattctttcgctgatacttatctcttcgcacaatacttcattcagcatgtaaataataatagtaagttaggtaaaagaacgaaatctaagcgtacatttgaatcagctaagacccctggtcgttgtgtggatgtctacaatactaagtttcaatataaagatggcaaaaatgagataaactgtatcttcaagtttgtattggaagaaacaaaacttaaagccgctgaggaaaactttgaaaggttaaggcataaaattacacacacattgataaaggatacaacggtaataaaccaaaatgacacaaggcaaccattgttgaagctaacaagtgtagctttagcatctctggtgggtgaagaaaagcgtaataagcttattggggcacctcctgttttggagcagcctcgtaaaattgaagttaaaattgacggtgcaccatcatcggatgagcttcgaaatctcttctcaatgagaggtgaagagtctgaatgggatgtgggttttttactggctgatcgtgctaatccggtttggctcagtagctatgtagccaggactaaacttcctcttcaagattcggatgggtttgagcattattcagcgcgttttttactggatgaaataaacaaaattcgtgatgatttgattagtgaagtaaaatatgctgaggaagcatccattaaagaatctgaagctgcatccacaaaaaagatagcggaaggttgatatgacagaaacggaaggtttgataataacagttgcaaaacagcaggcgattaattttgttgctgttgttttgtgctgcgttataagctatttttcgttcaaaagtttttcctataatgatgcaaaagatattttaggtgcgcttataaatatttcagcatctatattcactattgtcggtttatgggtcggttttttatatccgaatgcaatgaatagtattgttaaggatgatgtaagttatataaaaaatgagcatgactcaccaagaatagagaaattagtttatacaataatcacatctgcttgtgttatggctgggattctaattttctttttggttaaggcagtgttttatgcattacctgtttatcaagctaataaagacttgtttaaatacattggtattttcttcatttactttattagctggatgcaattaaaatgcgttatgagcctgattttgagtaatttacattttgttaatcacttacatggacgtttagcaaaagcgaaattagaacactatgatgaataaagtgttcgtattggcaggagttactgtggatgtttaacctcaacaagagtaagcctcctttaacatgggaatcaccgttctaacaagctttgcatgtctatgctgcatgaatccgcatgatcgttttaggatcgtttttgctgaggcccgccagaactggcgggcttttgcttatgtcatgcacctgcatgaaaaccactacataaagcgggcaggcgtggcggggatacgagcgcgctctgatatgaaaatctgaacaaaaaattacaaaatggtatctttttgttgctatcatcatttttgatggtaacttaaccttttcagtttctatattataaaattctatccagaagaaggaatttgtttcatggctgaactattaccgcaaacaacttctatacaaactatttattcatggtttactgaaggtaagatatttgttaatagacgttatcaacgaaaattagtttggactgcaatagagaaacaaaaattaattgaatccattcaaaaaaaatatccaattcctgcagttcttctcgcggaaagggaaaatgatcctggcacatatgaaataattgatggcctacaaagattacatgcaataatgtctttcatcgaaacaggatatgaatcacttgatggaaaacgttttaatctggacgcttttcccacagcgaaaaatcgagcggatgaaggtaagtttgttgcagtgaaagctgataatcttttaagtcagcgtgaggttactcagttattggattattctcttgcaatgtccattatgcgtaatgcgactgagaacgaaataaatgatgtttttgatagaattaatacatacgggcatagacttagtgatcaagaaaggcgccaggctggtatacaaaataaattttcaaatatggttagggatattgcctgttctatcaggggggatgtatctgacgacatattgcttttagagcaaatgccgtctattagcattgatttgccactaactaaacatggttaccaaattcagtcggaagaagtattttgggtaaaacatgggatcttacgttcaacagaccttcgtgacagtatggatgagcaatgcattgcagatatagcagcttgtattgttggaggtaagttaatagatcgttccaaagatgcgcttgatcagatttataataatgaagatgaagagtatagtcgtattagctctgctattaatgtttatggtgaaggaaaatttgcagaagagtttaaattctgcatccaggaaataacaaaagtatgtaatagtgacggtgaaattaaactcagggatttaatctttactaaacgtactacaaatgctttcccagccatatttgctgtgttatttattgcttttcatgaattactcattaaagaaaataagaagattaataattataaaggtgtaaaagacaatcttaataatatagtcactcgactagatactaaaagatctgctactggtggggaagagagaagaaagaatattaattctatcataggcttgattaaagataactttattgatagcgccgatagcagtcatatctataattctcacaatacggtggatattgaggatattttacgaagatctgaaatagagcttgcaaattatgaactgaaacagggtttgttgatgttaggcggagagcgaactattgatgatggcattcatgagaaaatattctccacaatttgtgctattgctaacatcggtaaaggtaacaagaacggtgtagttggtaagttattgcttggtgtaacagataaaccaagtgatacaagtagagtaaaagagcttgatgatatagatgcacatgtagttggtgagagaagtgttgttggtgttaaaagagaagctattaaactcggcatatcaatggaagaatattatagacgtttttgcgatgagttgaaaaaatctgctttgagtgagcctcttaaatcacaagtggtgagtttgattgactataatgacttttatggttatggagttatagttattacaattccacttctagcatcttattctagttatgatggggatatttattatcgtgctggcgataataccgtaaaagcaacagttatcgaagcagcagatattgcaacacgttttaaatgaaagaacgcctgctcaggcaggcgttaattataaacaggaactacaaaatatatttattaaatgtaattatattttcatctagccaacaattaagcgcttgcatcaatttttgcaaaggtaaaagctcattccgcacaaataccttactagctttctctacatccccaaaccccccgacattgctaggcataatccccatcatttgcggcggtacgcgatgtgctgccatcatgtcatcgcggctgacatttttgatattcagaaactcatccttcgccgcgacttctgacagaggaatgatctgaagcccatcctttttgccgttaggcgagtacataaacaggttgcggaagttacccggtcctttggcgcttttcattgcgttgcggaggttgttcacatcctcctggttttgcgcggcatcggtcatgtacatgatgaagcctgcatgactgccgttaatgtaatacttccggcggaacagcgtggcggactcgttgagcagagcggatggaatagcagaaagatagccaggcaggccgtagatctcctgattaatatccggttccatcagatgaaagatgctgcctttcgtgaactgatacggctgggttgccataccgtattgcacaaaccagtaggtatccaggtctaatccgcgtcgagtgtattttgccagggcaggttcaagggcgataacttcaccgaagcggttcgtgcgtttctccaggtaggcattaccaaataccagatagtcctgcacaaaacgtgaaaaagcctgctggctgagcaacgggtgagggatataggtgctggtcagaatgttgcactttactgcaatcggtgagctgtggtgtacggcggcgcggaaggttcgcgccaggccgtcgaaactcactggtggctcataccaacggtccatctgtacgcattccacatagtccagcagttcgcggcggtccagaacaggaacgggatcaccgaagctgaatgcttcggctgaagtctggtttttatgctggatctgtttcgtcgccgcagcgcggttcttcttactctttcccatcaaaaaatctccacaatattgctggtattggcggactcgccctgcagtggttcgttaaacagtgcgtgcattgttgcccaggccagatcggcatggctggcttcttcgctgcggctggcttcataggtcgggcggttgccgctggcggtggtggcgcgacggattgccatgaatgactgcgcaatgtcggtgtgcccggcgtcaaactcaagacggcggtggctgataatgtcgtaggccttgagtaccagggcgtttttaacgttggggttgtagacaaactcccggacggcaggaaaaaacgctttcacgttctcgtaaaccccgtgaccaacgccggttgagtcgatgccgatataggtcacgttgtactgttcggtcagttttttgatggcgtcagcctgggcgcgaaagtccattccgcgccactggtgacgctcaagaatgcggaacttaccgcctggcacggctggcggtgccaccaccacgcatccggcgctgtcgccgttctgcgtaccttttgccgggtcataaccgatccacacttcgcgccagccaaacgggcgcagggccagtgcatgaaagtcggtccagacttcccagctgtccaccatgcacgcctgcaattcgctgagcgggaacacggacgcgagatcgtccacgaactcgcacatcagcaagttctggtattcgtcagggctgtactccatgcgcaactggtcaaggtcgaacaggttacagccgccgcgcaccgcatcttccacggtgactatctggcggtattgcccgtctgcgcacagcaggccgggggccagattgctgtgggacaggtcgatgtccaccttatcggctctgttgcgcccacggttgaacagcgcaccggaccagaacggataagcactgtgtgtcagactggatggcgtggaaaaataggtctgtcgccatttcttgtgaatagccataccggaagccactttgcgcagctcctggaatttcggtatccagaaatattcatccagatacaggttgccgtggtaactctgggccgtgcgggcattggtgccgaggaagtacagcgtggccccgttaggaagcaccatcggatcgcctttcagctccacctccacttctttggcgaagtcgatgatgtactgcttaaagacgtgggcttgtgccttactggcggaaaggaaaatctggttacgcccggttagcagagcgtcaatcagggcttcacgggcaaaatagaaggtcgcgccgatctggcgtgacttcagcaggttgcggatgcggttggtttttccggcttcccaccagtggcgctggtagttgaacatggaggaatggaagatttcttccagcttctcaatctgttcatcggtgaaaacgttcttttccggctgacggcgcgggcctttgttgcggttggcgacgttagggtttaagtcggcttcgttgccgccattgttaaacttgccgatccgcgcatggcgctccgactggcgcgccagcaggtcaatctctttgaaatctttcccttctttgtgctccttcataatgagctggcagtagcgtgcggcggtggtgagctgcatctgatccagcggcccatagtcaccccacttgtcgcgttttttccagctgtgaacggttgcaactttctcgcccagcatttcagcaatgcgggctacgcggtatccctgaaagtacagcagcatggcctgccgacggggatcgagatctgcgggtgtcagtgtggtgttcatggcacaaacctacagccttgaatgaaggctttccccgcctgcggtttgtgtggttgtcggtacaaataccgcgcattgtttcactgcccccatcaccgcaaccataaggctccagtaagttttttctaacggagcacggctcatgacagtgaaagcaaagcgttttcgcatcggggtggaaggtgccaccaccgacggacgcgaaatccagcgtgaatggctggaacagatggcagccagctacaacccggcggtgtataccgcgctgattaaccttgagcacatcaagtcttatctgccggacagcacctttaaccgctacggcaaggtgacggcgctgtttgctgaagaaatcacggaaggtccgctggcaggcaagatggcgctgtatgccgacgttgagccaacggagtccctggtggaactggtgaaaaaaggccagaaattattcacctctatggaagtcagcccgaagttcgctgatacgggcaaagcctacctggtcggcctggctgccactgatgaccctgccagtctgggtacggaaatgctgacattcagcgccagtgcagcccataacccgctggcaaaccgcaagcagaatcctgccaatctctttaccgctgcagaggaaacggtgatcgaactggaagaaatccaggacgacaaaccgtccctgtttgcccgcgtcacggcgctgtttaccaaaaaagagcagtccgatgacgcccggttctctgatgtgcataaggccgtggagctggtcgccactgagcagcaaaacctgagcgcacgcaccgaaaaatccctgtctgagcaggaagaacgcctatctgagctggagactgccctgcaggcacagcaaaccgcctttaacgaactggtggacaagctgagtcatgaagacagccgccaggactaccgccagcgtgcaacaggcggtaacgcccccgctgacactctgaccaattgctgatggagcacaaaacccgatgaagaagaatacccgctttgcttttaacgcttacctgcagcagctggcgcgtctgaacggtgtggcagttgaagaactgtccagcaagttcaccgtggagccgtctgtacagcagacgctggaagaccagatccagcagtccgccgctttcctgacgctgattaacgtcacgccagtgactgagcagtccggtcagctgctggggttgggtgttggcagcaccattgccggaactactgataccaccgcgaaagagcgtgaacctgtcgatccgacgctgatggtcgatgtggaatacaaatgcgagcagaccaactttgacacggtgctgacctacgcgaagctggacctgtgggcgaaatttcaggatttccaggtgcgtatccgtgacgccatcgtgaaacgtcaggcactggaccgcatcatgatcggctttaacggcgtgaagcgtgcgaaaacctccaaccgtagtgaaaacccgctgctgcaggatgtgaacaaaggctggctgcagaaaatccgtgaggatgcaccggatcacgtcatgggcagcaccaccacaggcggtgaaaccacaccgggcgcggtgaaagtcggtaaaggtggcgaatatgccaacctggacgccgtggtgatggatgccgtcaatgagcttatcgacgtggtctaccaggacgatgacgatctggtggtgatttgcggtcgtgaactgttgtctgacaagtatttcccactggtcaacaaagagcaggaaaacagtgaaaaactcgctgccgatatgatcatcagtcagaaacgcatgggtggcctgcaggccgtgcgtgcgccgttcttcccgccgaatgcactgctgatcacccgtctggataacttgtccatctactggcaggaagacacccgccgccgttcagttatcgacaacccgaaacgtgaccggattgaaaactttgaatccgttaatgaagcctatgtggttgaggactaccgctgcgccgcactggtggaaaacatccagattggtgatttcagcgccgccgcagcagaagccggagcgtaaaccatgagcctgagtcccgcacggcagcatcgcctgcgcgttcaggctgaacaggccgcccgtgagggcggcagtgttcgccacgcgtcgggctatgacctgatgctgctgcagctggcggaagaccgccgccgtctcaagggcgttcagtccacggtgaaaaaagcggaaataaaggtggagctgctgccgaaatatgccgcctgggcggagggcgtcctggctgccggaggcgctcaacaggatgacgtgctgatgtacgtgatgctgtggcgcattgatgccggagattatgccggggcgctggagatcgggcgtcatgccctgcgtcatggctgggtgatgcctctgggtaaccgcaacgtgcagaccgtgctggcagaggaaatggcagatgcagcgcagagcgcaatgcttgccgctaccggctttgatgccgatctgttgctgcagacgctggagctgacagacggtctggatatgccggaccagtcacgggcgcgtctgcataaagcgattggcgctgtcctgagtgaaagcaatccggcttccgcccttaatcatctcaaccatgcgttacagctcgatccccgctgtggcgtgaaaaaagacaaacagcagctggagcgcagactgcgcaatgacagccgctgacagaacgtgcccccgcgcacgggcggcacggggtggcgaaaggcatagccacatcaaaatcccgtccaccgtcctctatttcaggagaaagcagcatgaagtttgttgcgccagaacaggcaccggaacaggcggaaatcatcagaaatacgccgttctggcctgatgtggacctgtcggagtttcgcagcgtgatgcgcactgacggcacggtgacgcagccgcgtttaaagcaggttgccctgtcggcaatttcggaggtcaacgcagagctgtatgagtttcgcagacgtcagcagatgctgggatatgcctcgctggcagaggttccggcggaacagctggacggcaaaagtgagcgcattcagcactatttcaacgcggtttactgctgggcacgcgccatgctcaacgaacgataccaggactatgacgccacggcatccggtgtgaagcggggcgaagaactggcagaagccagcggtgatttgtggcgtgacgcccgctgggccatcagccgggtacaggatgcgccgcactgcacagtggagcttatctgatgaaagtgcgtgcgcatcagtatgacacggtggacgcgctttgctggcgtcattacgggcgcacgcagggtgtcacggagcaggtactgaaggcaaatccggggcttgccgaatacggcccctttttacctcacgggctgcaggtggagctgccggacattccgaccaccaccaccgtgcagaccgtccagctatgggactgaattatgacgcttgagcgaatcagcgcctttatcacgtattgcatcgccgtcgtgctggcctggctgggcgatttgtccatcaaggatgcctcaacgctgggcggcctgatgattggtgtgctgatgctggctatcaactggtactacaaacacaaagcctaccagcttctgcgcgacgggcagatctcgcgggaggactatgaatccatcaatcgttaaacgctgccttgtcggggccgtgctggctattgctgccacgctgccgggttttcagcagcttcacacctccgtggaggggctgaaactgattgccgattacgaaggttgtcgtctgcagccgtatcagtgcagcgcgggtgtctggaccgacggcattggtaatacatctggcgtcattccaggcaaaaccattacggaacgacaggcagcggaaggactgatctccaacgtgctgcgtgtggagcggtcactggaaaggtgtgtgaagcaacagccaccgcagaaggtgtatgacgcggtggtgtcatttgccttcaacgtgggaacgggcaatgcctgcagctccacgctggtgaaattgctcaatcagcggcgctgggcggatgcgtgccgacagttgccgcgctgggtttatgtaaaaggtgtgtttaatcaggggctggataaccgccgtgcgcgggagatggcctggtgtttacagggagcaaactgaaatgaaaaagaaattaatcagcggactgtttctgatgttatggatggcgctgttaatcgcagcaatggtgtatccgcaggggatttttccggtactggcagcgtccggcgtttgggtagcctgtttgctgacatgggcagtaattccggtatcactggctgcgttaattaagaatggcccgctctggcaggagttaagggcatctttgctgaagacaattacccgaaaagaaaacgtatttaccagttgggtgatgcgattgctgattgttgtaagtctcgcctggacggggtgggctattaccctggtcttttatctactgaccgttattgccttctggatcacccgtaatcagatggcgcaacaggtagcagcatgaaccggttgctgctggttgtgctgacgttattactggcggcgctgggctggcagacgtggcggctggctgatgccagccagaccatcagcacgcaggcagacgagctgcagagcaaaagccaggcactggcaaagagcaacagccagcttatcagcctgtccattctgactgaaaccaataaccgggagcaggcgcggctctatgccgaagcagaacagaccagcgcgctgctgagacaacgacaacaccgaatcgaggaactgaaacgtgagaacgaggatttacgccgctgggctgatactcctttgcctgctgacattatccggctgcgggaacgtccggcactcaccggaggtacggcttaccgtcagtggttgtccgcgagtgacgccgtgtcggctggatcaggcaacgccgcgcactaacggtgatctgaacgcgttgctggatgaaacggaggccgcctgggcggtctgtgcagacaaagtggacatgattattgcgtgtcaggagcgaaacagtgaacaaaccacaatccctgcgccacgccctcaataaagcggtgccttatgtccgcaataacccggacaaactgcatctgtttgtggataacggttcgctggttgccacgggggccagctccatgtcgtgggagtaccgttacaccctgaacgcggtgattgaggatttcagcggcgaccagaatctgctgatggccccggttttgctgtggctgagggataaccagcccgatgccatcaataacccggcgttacgggaaaagctattcacctttgaggtggatattctgcgcaacgatgtctgtgatatcagcctgaacctgcaactgacggagcgtgtgctggtcagcactgacggcagtgtgtcgagcgttgaagctatagcggaacctgatgcacctgaagaaatgtggacggtgaaacgtggctgaactgcagaaggtggacgactggctgagtgccttgctggcgaatctggaaccagccacgagaagccgcatgatgcgccagctggcgcaggaactgcgccggacacagcagcagaatatcaggatgcagcgcaatccagatggcagcagttatgaaccgcgcagagtaacagcacgtagcaagaaggggcgcatcaaacgtcagatgtttgcaaagctgcgcaccacaaaatacctgaaaactgccgccagcgccgactctgccagcgtacagtttgaaggcaaggtgcagcgtattgcccgtgttcaccattacggcctgcgtgatcgcgtcagtcgcaaaggaccggaggtccgttacgcagagcgccgcctgctgggtgtaaatgatgatgttgaggcaatgacccgcaacatgattctgcaatggctggcggggtgatctttgtatcagcactgatacaagttgcagcactgccgcctttcttcccctgatggcaacctttccctatgaacgcacaattaaccgaaatcatgcgccttatcaccaacctgattcgcacaggggtagtcaccgaagtggacagggaaaactggctttgccgggtgaaaacgggcgagcttgaaaccaactggattagctggctgacgctgcgtgccgggaatgcccgcacatggtggcgaccatcggaaggtgagcaggtggtgctgctgagtctgggcggcaatctggaaaccgcctttgcgctgcccgctgtctattcgaatcagttcgcaccaccgtcgacgtcggcggacgcctgcgtgacagaacatcctgacggtggctggtttgaatacgaacccgccaccgggcgctggtatgtcaggggcatcaaatcaatggtcattgaggccgctgacaacatcaccatgaaaaccagtgagtttgtactggaggctgaccgcacgcgcattaacagcgaagtggtgatcaatggtggcgttacccagggcggcggagcgatgagttctaacgggatcgtggttgatgcgcatcagcatactggcgtcctgaaaggcggcgatacaaccggaggcccggtatgacgctttatatcgggatgaacaataccagcggtaaagccattactgatattgaccatctgcgtcagtcggtgcgggacattctactgacaccgcagggttgccgcattgcccgtcgtgaatatggttccctgctgtcgacactgatagaccagccacaaaatccggcattacgcctgcaggtcatgtcggcagtgtatgtggcgctgagtcgctgggagccacggctgacgctggattccatcaccattaaaagcaattttgacggttcaatggtggtggggctgaccgggcggcgtaataacggtgtgcctgtttccctttccgtatcaacaggagcagagaatggcagtgattgacctttcgcagttgcctgcgccgcagattgtcgatgtgccggactttgagacgctgcttgccgaacgcaaggccgaatttgttgtgcttcatccgaaagatgagcaggaagccgtgatccgcacgctggaactggaatctgaacccgtcaccaaattgctgcaggagaacgcttaccgtgagttgcttctgcgccagcgcattaacgaagccgcgcaggctgtgatggtggcttacgcgatgggcggcgatcttgaccagctcgctgccaactacaacgtgaaacgcctgacggtgacgcctgctgataatgacgctgtgccacccgttgcggctgtgatggaaagcgatgaagcgttacgcctgcgtgtgcctgcagcctttgaagggctttctgttgcggggccaactgccgcttatgaatttcatgcccgaagcgccgacggtcgggtggcggatgccagtgcaaccagtccggcacctgcagaggtggtactgactgtcctgagtcgtgaaggcgacggaacagcagaaaaagacttgctggatgtggtggagaaagccctgaacagtgagaacgtccgcccggtggctgaccgtctgacggttcgcagcgcagaaatcatcccgtaccgtgtggaagctaccatttttctttatccgggaccggaagcagagccggtaatggcagcggcaaaagtcagcctgcagaggtacatcgccagtcagacgcggctcggtcgggatattcgccgtagtgctatttttgccgcgctgcatgttgagggtgttcaacgtgtggagctggcttcaccgctggctgatgtggtcctgaacaaaacgcaggcggcatcatgtacgcagtggagcgtgaccaacgggggaacggatgaatagtctgctgccaccgggttcaacgccactggagcgccgactggcgcaaacctgtagcgggatttctgatctgcaggtgtcactgcgtgacttgtggaatccggcaacctgtccggtcagtttcctgccttatctcgcctgggcgttctctgtggatcgctgggacgagggctggacagaaagcgtcaaacgccaggtagtgaaggatgctttttatattcatcagcacaaaggaaccaccagtgccgtacggcgggtggtggagccgttcggcttcctgatccgcattattgagtggtggcagaccggagaaacaccgggcacgtttcgtctggacattggtgtgcaggaccagggcatcactgaagatacctatctggaacttgagcgactgataagcgatgccaaaccatgtagccgtcacatgatcggcatgtccatcaatctgcagaccagcggcccgcattgggtgggagccgccagttatcttggcgaagaaatcacgatctatccgtatatcaacgaaacaattatttccggcggcaccgcgcatgaaggcggggcggtccatgttattgacacaatgagagtgaatccatgagcacaaaattttataccctgctgacggatattggcgcggcgaaacttgccagcgccgccgcgctcggtgtgccgctaaaaattacccatatggcggtgggcgatggcggcggagcattgccgacgccggacgcaaagcagactgcactggtaaatgagaaacgccgggctgcgctgaatatgctctatatcgacccgcagaacagcagccagattattgctgaacaggtgatccctgaaaatgagggtggttggtggatacgtgaagtgggtctgtttgatgagtccggggcattgattgccgtaggcaactgcccggaaagctataagccgcaactggctgaaggcagcgggcgcacccagaccgtgcgcatggtgttgattaccagcagcacggacaatatcaccctgaaaatcgaccctgccgtcgtgctggcaacccgcaagtatgtggatgacaaggtactggagctgaaggtgttcgtggatgataagatggcaaaacatcttgccgcaccggacccgcattcacagtatgcacccaaagaaagcccgacattgaccggaacacccaaagcgccaacgccagcggaggggaataacaccacgcagattgcgaccaccgcgtttgttcaggcggcactgatggcccttattaatggtgcgccagccacactggatacgctgaaagaaattgccgctgccattaataatgacccgaaattcagtaccactattaacaatgcgctggcactgaaagcgccgctgtcaagtccggcactcaccggaacgccaacagcccccactgccgcacagtcggttaacaatacacagattgccactacggcttttgtgaaatcggcgattgcggcaatggtgggttctgcacctgcggcactggatacactgaacgaactggcggcggcgctggggaatgacccgaactttgccacgacaatgcttaatgcactggcaggtaaacaaccgctggacaatacgctgactaatttgagtggaaaggatgtagctggtcttctcgcataccttggtttgggagaaggttctgcattacctgttggtgtgcctgttccatggccttcagccacaccgccaacaggctggctgaaatgcaacggtgcggctttttctgctgaagaatacccggaactggcaaaggcttatccgacaaataaattgcctgatttacgtggtgagtttattcgtggctgggatgacgggcgcggtattgatgcaggacgtgttttattgagcattcagacagggatgctggaaaagcaccgtcatcctgttgtcgccaacgatgggtatgactcaaaagaggtatgggaactggcggcaatcttcagaagagcatatacacagggcaagggactggatggtaccagtgcaggcggaactttgattccatcaccaacgctacatacacgagggagtgtcggtaatactggcgggagtgaaacccgtccacgaaatattgcatttaactttatcgtgagggctgcataatggataacgccgtattaaatagcgagcttattgccacgaaggcggggaatattacagtctataactatgatggtaaaactcgggaatatatttctacttcaaatgaatatcttgccattggtgtcggtatccctgcatattcctgtttagatgcccctggcacacataaggctggttatgcaatctgccgttctgcagattttaactcatgggaatatgtgccagatcatcgcggtgaaacggtctatagcaccgaaacaggagaatcaaaagaaatcaccgctccgggtgattaccctgaaaatacaaccactatcgccccattaacgccatacgataaatgggatggtgagaaatgggtgacggataccgagacacagcatagcgccgcagtagatgcagcagaagcacagcgccagtcgctgattgatactgcaatggcttccatcagtctgattcaactgaaattgcaggccggacgtaaactgacgcaggcagaaacaacccgacttaacgctgtgctggattacattgacgcggtgacggcaacagataccagcaccgcgccggatgtcatctggcctgaactgccggaggcgtaggccattcaatatctggcgcaccggaagtatcgaccagttccagtgcgtccaggtaatccagccacaaattatattgcgccagttcgtcacctttcagacgaccaatagccgctttaccaggccattgcttactgttcatgtattcgttggcctggttaattagtagctgtctttctgattcagtaatttcaataagctcttcatgcgtgggtggaggaatatctgcccacgcaggcagcccatcatctccggcaatacggatttttccttgtggcggttcagccataaactcactgataatattttgatttacttccttagcgtctgataaatcccatccctctgatttatatttatcaatcatatccacagggaaaaaagcattatgccttgcgctataaacatattcgttcatataaatcaccctgaataaaattactcaccaacagcccaccaactgtaattcatcgataccgtgtcgctggttgatgacgttctgtaagcagaattaaaaccggttaatgttgggccttctgcggtcatcacgaatccccgcccagcacctaaaggcgcaccaccatcaccagaatgagtaagcatggcgcagtccacttttttaggaaaagggatgctgaatgtaattctcattgtttgcgtcgataatgtcggcgtaaccgcaccacgaccatattgcaggattttcccgttgggtaatttcatccatccatcaccactggcaaaagaggccatgtccggtatctgattttcccctgtccctacatcccgttttgccgcttctcccaaaccaacgtttaagaaaatgcagcgattacgactaactggcatcatccccgatttttattcaaggagatgatcatgcttattggctatgtacgcgtgtcaacaaatgaccagaacaccgatttgcaacgtagtgcgctgaactgcgcgggatgtgagcggatttttgaggataaaatcagtggcactaagtccgacagaccggggctgaaaaaactgctcaggacactatcggcaggagacacgctggttgtctggaagctggacaggttggggcgcagtatgcggcatcttgttacgctgatagaagagttgcgccagtgtggcgtgaatttccgaagcctgactgacagtattgataccagcaccccaatgggccgtttcttttttcatgtcatgggggccctggctgaaatggaacgcgaactgatagttgaacgtaccagggcggggctggctgcagctcgtgctaaaggcagagtaggtggacgccgtcctaagttgaccaccgaacagtgggcacagattggacgtttactcgaggccggagaatcaagacagcgtattgcactgatttttgatgtgggtgtttccacaatttatagaaaatttccggcaaataagagcaatgaatccccctgaatcagcattatgttgattatccctgcaagcagacaaataccgtcattttgtatgaataacggtacaactgcgcttagctgtttgtcaggcacaatcacttcaacatagggcgaagcctaatccaatcaggaggttcgccactatggctcaggattaccaccacggggtgcgcgttgttgaagtcaacgaaggcacccgatccattaccacggtgagcaccgccatcgtgggtatggtctgcacgggcgatgatgccgatgcaaaaatgtttcctcttaataaacccgtgctgatcactgatgtgctgactgccagcggtaaagcgggtgagtccggcacgctggcccgttcgctggatgccatcgctgaccaggcaaaacccgtgaccgttgttgtgcgtgtgccgcagggtgaaacggaagaagaaaccacgaccaatatcatcggcgcagtgactgctgaaggtaaaaaaacaggcatgaaagccctgttatctgcccagacacagctcggcgttaaaccgcgcattctcggcgtgccaggtcacgataacaaagccgttgctactgagttgctgagtgtggcgcaaagcctgcgtgggtttgcttacctgtcagcgtatggctgcaagacggtgcaggaggcgatcacttaccgtgaaaacttcagccagcgcgaaggaatgctgatctggcccgactttactggctgggacacggtgctgaatgccgaagcaacggcatatgccaccgcccgtgcgcttggtctgcgtgccaaaattgatgagcagactgggtggcacaaaagcctgtccaacgtgggcgtgaacggtgtcaccggaatttctgcagatgtgttctgggatctgcaggacccggcaaccgatgcaggtctgctgaaccagaacgacgtcaccacgcttgtgcgtaaagacggtttccgcttctggggttcccgctgcctgagtgatgacccgctctttgccttcgaaaactacacccgcacggcgcaggtgctgacggacacaatggcagaagcgcacatgtgggcagtggacaaaccgctgaacccgtcgctggcgcgcgacattatcgagggcatccgcgccaaaatgcgcagcctggtcagtcaggggtatctcattggtggtgattgctggctggacgagtcggtgaacgacaaagacactctgaaagccggaaaactcaccatcgactacgactacacgccagtgccgccacttgaaaacctgatgttgcgtcagcgcatcaccgatcagtacctggtgaatttcgccagccaggtcagcgcgtaaggggacaacatggctttaccacgcaaattaaaacacctgaacctgtttaacgacgggaacaactggcaggggatcgttgagtcgctgacgctgccgaaattcacccgcaaatatgagaagtatcgcggcggcggaatgccgggggcagtggatgtggatctggggcttgatgacagtgcgctggacacagaattttccattggtggcactgaactgctgctgtttaagcagatgggcaaagccacggtggatggcatccagttgcgctttaccggctctatccagcgtgacgataccggggaagtgcaggccgtggagcttgtggtgcgtggacgtcacaaagaagtggactccggtgagtggaagacgggcgaaagcaacaccaccaaagtgaccagtaccaacagctacgcgaagctgaccatcaatggtgaggtgctctatgaagtggaccttatcaacatggtggaaattgtggacggtgtggacctgatggaagcgcaccgcaacgccctcggcctctgatgtatctgaacggcgcgggattccgcgccagaacccaatttacaggacaacaaaatgagtgataagcagactgaaaagaccattcaactggatacccctatcaagcgcggtaaaacagaaattaccgaaattgtgctgcgtaaaccgcagtccggtgcgctgcgcggtacacgcctgcaggccattatggatatggatgtgaacgcgatgatgaccgtgatcccccgcatctccagtccggcactgactgcacaggaaattgcagagatggacccggcagatctcactgccatgtcggttgaggttgtcacttttttgttgaagaagtcggtgcttgccggtttaccgacagcctgacggttgacgatctggtggctgatatcgccaccatctttcactggccgccatccgttactgacgttatgccgctgaccgaagtgctggaatggcggtataaagcgattcagagaagcggggccaacgatgagtgataataacctgcgcctgcaggtcattcttaatgcggttgacaaactcacccgcccattccgtgctgcacaggccagttcgaaagagctggctggcgcaattcagaatacccgaaacagcctcaaagaactgaataagcaggctggcagaattgatgaatttcgcaagacgcgctcgcaactagccataacagccaacaacctgaacgcagcccgcgaagaggcggcaaaactcgccacacaatttgctgccactaacaggccaaccgccgcgcaggcaaagttattcagtcaggccaaaacacgagtacaggaacttcagcagacctataacggcttgttgggggcggtccagagacaacgtcaggcacttaaagaatcagggattgataccagacaactcagtagtgcccagcgagaacttaagaaaaatgctgaagaaacaaggcaggcactggagggccagcaaaaagcacttaaacgtctgggtgaacaacaggcacggatgaacgctgccagagaacaatactcaagacggcttgaagtgcgcgatcgcatcgcaggagccggagccactaccacggctgcagggctggcaatgggtgcgccagtgatggcggcagtaaaaagctataccagcatggaagatgccatgaaaggtgtggcaaagcaggtcaatggtctgcgtgacgataatggcaaccgcactgcacgtttttatgaaatgcaggatgccatcaaggctgccagcgaacagttgccgatggaaaacggtgcggtggacttcgctgcactggttgaaggtggtgcgcgcatgaacgtcgcaaaccctgacgacagctgggaagaccagaaacgtgacctgctggccttcgccagtacggcagcaaaggcggcaacagcctttgagctgccagcggatgaactgtcagaaagtctggggaaaatcgcccagctctacaaaatacctacccgcaatattgaacagctcggcgatgcgctgaactatctggatgataacgccatgtcgaaaggggcggacatcatcgatgtgatgcaacgtctgggcggtgtggctgaccgtctggattatcgtaaagcggcggcactgggttccaccttcctgactctgggtgctgcgccggaggttgcagccagtgcagcaaacgcgatggtgcgtgaattgtccattgccaccatgcaaagcaagagtttctttgaagggatgaatctgctgaaactcaatcctgaagtgattgaaaagcagatgacgaaggatgcgatgggaactatccagcgcgtactggagaaggtgaacgcactgccgcaggataaacgtctgtctgccatgaccatgttgtttggtaaagagtttggcgatgacgcggcgaaactggcaaacaacctgccggaactgcagcgccagctaaaactgacagcgggcaatgatgcgctcggctccatgcagaaagaatccgacattaacaaggactcactttctgcgcagtggttgctggtcaaaaccggagcgcagaacaccttcagcagcctgggcgaaacgctgcgccagccgctgatggatattctgtacacggtgaaaagcatcacgggggcgttgcgccgctgggtggaagctaacccggaactgacaggcacactgatgaaagtagccgctgtggtggctgcggttaccgtaggcctcggaaccttagcggtggcgctggctgcagtgctggggccgctggcagtgatccgtctgggattctctgtgctgggtatcaaaacgttaccttccgttacggcagcagtaacccgaacccgcagcgcgttgtcctggctggctggcgctccactggcactgctgcgacgcgggtttgcttcatcgggcaacgcagcaggtttacttactgcgccgttgtcgtctttgcgccgcacggcatcactgacgggaaatgccctgaaaactgtagcaggtgcgccggttgcacttttgcggtctggattatccggtttacgtgctgttgctgtgatgtttatgaatcctctgtcggtactgcgcggtggactggtcgccgcaggcacggtgctgcgagtactggcatctggtccactggcgatgctgcgcgttgccctgtatgccgtatctggtctgttaggtgctctgctcagtccgataggtcttgtggttactgcactggcgggcgtggcgctggttgtctggaaatactggcaacccatcaccgcatttcttggtggcgtggtggaaggattcaaagcggcggcaggtcccgtcagtgcagcgttcgaaccgcttaagcccgtgttccagtggattggcgacaaagtacaggcgctgtggggctggtttactgatctgctgacgcccgttaagtcgacctctgccgaactgcagagtgcagcggcaatggggcggcgattcggagaggcactggcggaagggttgaatatggtcatgcatccgctggactccctgaaatccggcgtttcctggttgctggagaaacttggcattgtcagtaaagaggccgcaaaggcaaaactgccggaaagcgtgacgcgtcagcaacctgcgacggtgaatgcagacggtaaagtgatgatgccatcgggtggttttccgtcatgggggtatggctttgcggggatgtatgacagcggcgggtatatcccgcgcgggcagtttggcatcgtcggtgaaaacgggccggaaattgttaacggcccggcaaatgtgaccagccggagaaatacagctgcactggctgccgttgttgccggaatgatgggcgttgctgccgcgccagcagagcttccaccgttgcaccctttggcactccccgcgaaaggtggagaagcaattgtgagtcgcgcagccactgtgccgctcgttcaacggattgaggtaccgacgcagatcatcattcagacgcagccaggacaaagtgcgcaggatattgctcgggaggtggcacgccagcttgatgaacgtgaacgcaggctgaaggcaaaagccaggagtaactacagcgatcaggggggatacgacgcatgatgatggtgctgggattgtacgtgtttatgctgcgcaccgtgccgtatcaggaactgcagtatcaacgcagctggcgacatgcggcaaacagtcgggtaaaccgacgtccgtccacgcagtttctgggaccggaaaacgacatgctgacgctttccggtgttcttatgccggagataacaggcggcaggctgtcgttgctggcactggagcagatggcagaacaggggaaagcatggcccctgattgaaggcagcggcacgatttacggtatgtatgtgattgagggactgaatcagactaaaacggagtttttccgcgacggtatgccgcgccggattgagttcaccctgtcgctcaaacgagtggatgaatccctgtccgatatgttcggtgatctcagtgcgcaactgaataatctgcaggacacggcaacgtctgccttaagcgatatcagtaaaacggtgggagggctgctgtcgtgaatttcagctctgaactgcttaacaaaggcaacaaaactcccgcattcagcatcagtattgagggcagggatatcaccactgtgctggataaccgcctgatgagtttgacgctgacggataaccggggctttgaagcggaccagcttgatctggagctggatgacgctgacggaaaaatcgtgctgccgcgccgtggtgcggtcattacgctggcgctgggctggaaggggcagccgcttttcccgaaaggggcattcacagtggacgagattgaacacactggcgcaccggaccgcctgactatccgggcgcgaagtgctgattttcgggaaacgctgaatacccgccgtgaaaaatcgtggcataagaccaccgtcggggaagtggtgcaggaaattgccgcgcggcacaagctgaagatggcactgggtaaagacctgtcggataagcccgtggagcatatagaccagactaatgagagtgacggcagttttctgatgcggctggcgagacagtacggtgccatcgcgtcggtgaaaaatggcaatctgttattcatccggcaggggcagggcaaaagcgccactggtaaacctctgccagtgatcactatcacacgcaaggacggcgacagtcaccgatttaccctggcagatcgcggagcctacacgggcgtaattgccagctggttgcatacccgcgaacctgcgaagaaagaaagcaccacggtgaagcgtaagcgcagaactaagaagcagaagaaagagccagaagcgaagcagggcgattacctggtgggtacggatgaaaacgtgctggtacttaatcgcacctatgccaaccggagcaacgccgaacgagcggcgaaaatgcagtgggaacgcctgcaacgcggcgttgcgtcattttctctacaactggcagaagggcgggcagatctctacacggaaatgtctgtgaaggtcagtggttttaaacagccgatagatgatgcggaatggaccattaccaccctgacacataccgtcagcccggataacggttttacgaccagtctggagcttgaagtgaggattgatgatttcgaaatggaatgattcttcgcaatggagaacttttaagtttgcaaaatggaataatacggtatcattgttgtgaatttagcaaaaatggggagaactcgaaaaatgatgatttgcccactgtgtggaagtgccgcccatactcgcagcagttttcaggtatcttcattgaccaaagagcgttataaccagtgccagaacattaactgcagccatacttttgttacccatgaaacttttgttcgttcgattgcaacaccaaaagagtcgaatccagttcagccgcatccaatgaaatcaggacaggtggcgctctctctttgacgctgccgccattttgtcgccatcgttaaaaaacagtgcttctaacatcatgattttaaacatcttaaatttcaggcaacaaaaaacccatcaaccttgaaccgaaatggcggggttgatgggctccacaaaatggggacatcaaagaaaagcagtggcactaattaagactgatgccctgcggaaaagttctgcggttgtgcaaaaaaatttcattttcagggcaacttcagttttatcctaatcctggccataccatgacgatgattgtccctgccagcgtcagcaggacgttggcgattgcataggtgcccgcatagcccagcgccgggatgttactgcgagctgtatcactgatgatctccattgccggcgcgcaggtacgtgcgcccatcattgcgccgaacaacagcgcgcggttcattcgcaatacataagcaccgaacaagaaacagataaccacgggcaccagactgacaatcaatccggcaatcaacatctgaccgccaatcgcgcccaggccgttattaataccgctaccggcgctcagaccaacgcctgccataaacaccatcaagccgaactctttcaccatgcttaatgcaccctgcggaatgtaaccgaaggtcgggtggttagcacgcataaagcccagcataattccggcgaataacaacccggcagcgttccccatgccgaaactgaatgtgctgaactggaaggtgatcatcccgatcatcagcccaataacaaagaaggcgcaaaatgccagcaggtcagtgacctggctgtgaatcgagataaagccgatgcgatcggcgatggtttttacgcgacgggcatcaccgctgacttgtaaaacgtcacctttgttaagcacgacgttgtcatctatcggcatctcaatctggctacgaatgacgcggttaaggaagcaaccgtgatcggtcaacttcagttgtgcgagacgtttacctacagcgttatggtttttaacgaccacttcttcagtgacgatacgcatgtcgagaaggtcacgatcgaaaacttctttaccgttacggaagctgggatcgagtcgggcatgggcgtcgggatagcctaccaacgctatttcatcgcccatttgtagcacggcatcaccgtctggatttgccagaatcccgttacgtcgaatacgttcaatgtagcagccggtttgtcgataaatacccagttcacgcagatttttgccgtcggtccaggccaccagctccgggccgacgcgataggcgcggatcaccggtaaataaaccttacggttggcatcagtgtccaggccacgttcgcgggcgatttgctgggcgctggtctgtaagtcctgatgctgcaatttcggcaagtaacgcgcaccaacaatcaaactcaccagaccgattaaataggttaaggcatacccgaggctcagattatccagtgccagtgagagctgcctgctttccatgccggaatgacgcagtgtatcgccagcaccgaccagaaccggtgtcgacgtcatagagcctgctaacataccggccgtcaggccaatatcccagccaaacagcttacctaaccctaaggcgatcaccagcgcactgccaaccatcaccagtgctaacattaggtaatttttcccatcgcgaaaaaaaatggaaaaaaagttcggtccggcttcaaccccaacacagaaaataaacagcataaagccaagattaagcgcatcggtgttaatgctgaaatgttgttggcctaataacagcgatacgactaaaacgccaatggaattacccagttggatcgaaccaagtcgtaactttccgagacatagcccaagcgcgaggaccacaaataataacagaatgtaattcccatttaacaattcggcgacgtttatattcacggaggctaacttcttgtttactagtaagctgttgaaagaaatggtaatttacgataatgttttttaccagaattcagggcgcagattcattcagcgcacctaaacgatagtaaagtaacaatatattttactagtgtaatcacattaggtatcaacggctatatgaattgcgttggcctatattagcatggaatgcgaagcggctttatcttactgaacgccacactggcgaaaaatgtgttcgatagacgcagtgtcaggaggaacgagtgaaacataaacaacgttgggcgggggcaatctgctgttttgtcctcttcattgtggtgtgcctttttctggcgacgcacatgaaaggcgcttttcgggctgccgggcatcctgaaatcggcttgctatttttcattcttcctggagcagtcgccagcttcttttcacagcgtagagaagtcctgaaacctctgtttggcgcaatgctggcggcaccctgttcgatgctcattatgcggctgtttttttcaccgacgcgctcattctggcaagagctggcatggttattaagtgcggtgttctggtgtgcgctgggggcactgtgtttcttatttatcagtagtttgtttaaaccacagcacagaaaaaatcagtaaagccctcaacgcgagggcttgtcagacgatcaggcgtccagattttctttcacccatgcagcaaaatcggtatagccgccgatatgttgctgatcgacaaaaatctgcggcacggtttctacgggtttacctgccttttgttgtagatcttctttagtgatcccttccgcacgaatatctacatagtgatactgaaaatcatcgtgttcattgctcaatttctcagccagatcttttgcacgcacacagtaagggcaacccggacgaccaaaaataacggtttgcattatttctctcctcatagatttatgcctgtaatgatcacgctaaaatgtattcgctgaaagtaggtttaacctgttgcattaattgctaaaagctataactgttaaacacaatacagtgaaaagttttagactgaaggctcactttgcagagggaagcgtatgcgcgcgatcggtaaattgcctaaaggcgtgttgatactggaatttatcggaatgatgctactggcggtggcgctgctgtcggtaagcgactccctgtcgctgcctgagccattttctcggccagaagtgcagattctgatgatttttctcggtgttttgctcatgcttcccgctgcggtggtggttattcttcaggtggcaaaacgtcttgccccacagctgatgaaccgtccaccgcaatattcacgttcagaaagagaaaaagataatgacgccaaccattgaacttatttgtggccatcgctccattcgccatttcactgatgaacccatttccgaagcgcagcgtgaggcgattattaacagcgcccgtgcgacgtccagttccagttttttgcagtgcagtagcattattcgcattaccgacaaagcgttacgtgaagaactggtgacgctgaccggcgggcaaaaacacgtagcgcaagcggcggagttctgggtgttctgtgccgactttaaccgccatttacagatctgtccggatgctcagctcggcctggcggaacaactgttgctcggtgtcgttgatacggcaatgatggcgcagaatgcattaatcgcagcggaatcgctgggattgggcggggtatatatcggcggcctgcgcaataatattgaagcggtgacgaaactgcttaaattaccgcagcatgttctgccgctgtttgggctgtgccttggctggcctgcggataatccggatcttaagccgcgtttaccggcctccattttggtgcatgaaaacagctatcaaccgctggataaaggcgcactggcgcagtatgacgagcaactggcggaatattacctcacccgtggcagcaataatcgccgggatacctggagcgatcatatccgccgaacaatcattaaagaaagccgctgtagattcaatctgtcaatgcaacacccctttcaattatctctttcggtgtttttgaacttcagtgtctttctcggtctgttgtttagctgagcagcaaccagatctagttcatgttgagtatattgggcaagacatgtctttttaggaaagtactgccgaattagcccatttgtgttctcatttgttccccgctgccaaggactctgaggatcgcagaagtaaactttaacgccggtgctgacagtaaattctagatgtctggccagttccattcctctgtcccatgtcagtgattttctgagttctgacggtaaactcaggaatttgtcggtaagagcctgatttactgagacagaatctttgcccctgagtctaaggatgatcgtataacgtgattttcggtctacaagtgtggctatatgagagttttttgtacctgagactaaatcgccctcccaatgccctagagagcgtctgttatcgatatttcgggaacgttcgtgaattggtgttccgttcactatgttaatcgtacctctttcgcctttgcgggtatgacgcctgccatggcgaaggctatgcgaccgtcgcagatgctgtatattcaggtggtgtagcgcttcacggctacgaaagtacagcgttttataaattgtctcaggtgatattcgcagcgttttttgacgtggttttgttcgccttaaccatcctgatatttgctctggagaccatttcatctccagcttttccagaacaagctttcgcaatggtaaattttgatccagtaagtcacggttttggccttttcgccattctgttggctcggttattagcatcaacagctttgtaatagcgtctgccccgattacgctgaacttcacgtgagatcgtcgaaggactgcgattcagcgcagtagctatcgcacgaatgctcattttggctgacaaaccagctcgtatctcctcgcgctcagacagtgtcaggtgagttacagcccgcttacgctcatggggttttatgccgccagtatcccttaacatagtgaagatcgttccgggttttgaacccaggatattcgctatttcactgaagcctgttccgttcttccatagttcaaaaacagaggctttttcctctgctgtaaatgttcgtctcattcaaaaaacctccgcaaccccatgttttcacataactgttgcgttgaccaattgaatctacagcccatttattctggattatttgcacaaacagggttgggcgacgcgctaaaaccgccacgtcgatgtatgatacgcgggcttttgaccaggtctgacagagaggtgcagggtgaaaattgccatattgtcccgggatggaacgctctattcgtgtaagcggctgcgtgaagccgctatacagcgcggtcacctggttgaaattcttgatccgctttcttgctacatgaacataaatcctgcggcgtcttctattcactacaaaggccgcaagttaccccattttgacgcagtgatcccgcgtattggcaccgccattaccttttatgggacggcggcactgcgccagttcgagatgctggggagctatccgctcaatgagtcggtcgccattgcccgggcgcgtgacaaattgcgttccatgcaactgctggcgcgtcagggcatcgacctgcctgtcacgggcattgcgcattcgccggatgataccagcgatttaatcgacatggtcggtggtgcgccgctggtggtcaagttggttgaaggcacgcagggaattggcgtcgtgctggcggagacgcgtcaggcggcggaaagcgtgattgacgctttccgcggtctgaacgcgcatattctggtgcaggaatatatcaaagaggcgcaagggtgcgatatccgctgtctggttgttggcgatgaagtggtcgctgcgattgaacggcgggcgaaagagggcgattttcgttccaatttgcatcgtggcggcgcggcaagcgtcgccagtatcacaccacaggagcgtgaaatcgcgataaaagccgcgcgaacgatggcgctggacgttgctggtgtggatattctgcgtgctaatcgcgggccgttggtgatggaggtgaatgcgtcgccggggctggaaggaatagaaaaaaccaccggtatcgacatcgcgggtaaaatgatccgctggatcgaacgccacgctacgacagaatattgcctgaaaacgggtggttagtcgcaatcacattactgatcatggttttgcctgcgctttttgcgtaagctgtgccggtctttttatcgaaagaggttgtacaaaattatgacatcgctggtcgttcctggtctggatacgctgcgtcaatggctcgatgacctggggatgagtttttttgaatgtgataactgtcaggctctgcatctgccccatatgcagaatttcgacggtgtctttgatgccaaaatcgatctgatcgataacacgatcctgttttctgccatggcggaagtccgaccttcagccgtattgccgctggcggcggatttatctgccatcaatgccagttcgctgaccgtgaaagcatttcttgatatgcaggatgataatctgccaaagctggtggtttgccagtctttatccgttatgcagggcgtaacctatgagcagtttgcatggttcgtgcgtcagagcgaagagcagatttcgatggtcattcttgaagctaatgcccatcaactgctgttaccgactgatgatgaagggcaaaacaacgttaccgaaaactatttcctccactgataactcctttcgagcacgcagtcgctggtgcagtggctgcgcgctgcaaaattatctgctgtttttaaccttttcttaaagattatttcacttctcttgtgtcgatttggctttatcacatagagcaaatatgcataaaaatttgttaaataccgttttttaatccgagctatagtctcaaatcctggctaaagttattcttgcgatgcttttatatagcgagcagtgctggccgggagaaagttctcttttcttacaccgcgccgataaaaaatatgcacgtttattgcatatctttcagtgtgacaacttttgttcgtttgttaacgaactttcagaaggaaagagatatgaccgccttaaataaaaaatggctatcgggtctggttgcgggtgctctgatggccgtctctgtcggcacgctcgcggctgaacaaaaaacactccacatttataactggtctgattatatcgccccggacacggtggccaattttgaaaaagaaaccggtattaaagtcgtctacgatgttttcgactctaacgaagtactggaaggcaaattaatggccgggagtaccggccttgatctggtggttccatctgccagctttctggagcgccagttgactgcgggagttttccagccgctggacaaaagcaaattgccggagtggaagaatctcgacccggaactgctgaagctggtcgccaaacacgatcccgacaataaatttgctatgccctatatgtgggcgacgaccgggattggctataacgttgataaagttaaagcggtgctgggcgaaaacgcgcccgtcgatagctgggacttgatcctcaaacctgaaaatctggaaaaactgaaaagctgcggtgtctctttcctggatgcgccagaagaagtttttgctaccgtgttgaattatctcggcaaagatcccaacagcactaaagcggatgattacaccggaccggcaacagatctgctgttaaagctgcgcccgaacattcgttatttccattcatctcaatacattaacgacctggcaaacggcgatatttgcgtcgctatcggctgggcaggtgatgtctggcaggcgtcaaaccgcgcgaaggaagcgaagaatggagtgaatgtctcgttctcgattccaaaagaaggggcgatggcgttctttgatgtattcgccatgcctgcggatgccaaaaacaaagacgaagcctatcagttcctgaattacctgctgcgcccggatgtagtagcgcatatttccgaccatgtgttctatgccaacgccaataaagcagccacgccgctggtgagtgcggaagtccgtgagaacccgggtatttatccgcctgcggatgttcgtgcgaatctgttcactctgaaagtgcaggacccgaaaatcgaccgtgtgcgcacccgcgcgtggaccaaagtgaagagcggaaaataatccgcagccttagatgccgggcgggcgcaccacacccgccggcaattcgcaccatcatggtgcgcttgcacacattcaatgccggagagcagccgtgaatgatgctatccctcgcccgcaggcgaaaacccgtaaggcgctgacgccgctattagaaatccgcaacctcaccaaatcctacgatggtcaacatgcggtggatgatgtcagcctgactatctacaaaggtgaaatcttcgcgctgctgggcgcttccggctgtggtaaatccacgctgctgcgtatgctggcaggttttgaacaaccctctgccggacagattatgcttgatggcgtcgatttgtcacaggtgccaccttatctacgccccatcaatatgatgtttcagtcttacgcattgtttccccatatgactgtggagcagaacatcgcctttggcctgaaacaggacaaactaccgaaagcggaaattgccagccgggtcaacgagatgcttgggctggtgcatatgcaggagttcgccaaacgcaaaccgcatcagctttccggcggtcagagacagcgtgtggcgctggcccgaagccttgccaagcgcccaaaacttctgctgctcgacgaaccgatgggcgcgctggataaaaaattgcgtgaccggatgcagcttgaagtggtggatattctggagcgcgtcggtgtgacctgcgtgatggttactcacgatcaggaagaggcgatgaccatggcggggcgcatcgccattatgaatcgtgggaaatttgtccagattggcgaaccggaagagatctacgagcatccgactacccgctatagcgccgaatttattggctcggtaaacgtctttgaaggcgtactcaaagagcgtcaggaagatggcctggtgcttgattcgccggggctggtgcatccactgaaagtcgacgcggatgcctcggtggtcgataacgtgccggtacatgtggctctgcgcccggaaaaaatcatgctttgcgaagagccgcccgccaatggttgtaacttcgcggtgggggaggtgatacatattgcctatctcggcgatctttcggtgtatcacgttcgtctgaaaagtgggcagatgattagcgcccagctacaaaacgcccatcgtcatcgtaaagggttaccgacctggggcgacgaagtgcgtttgtgctgggaagtggacagctgtgtggtgctgacggtttaaggagcaaagatgaatacacttgaacctgctgcccagtcgaaaccgccgggcggatttaagctgtggttgtcgcagctgcaaatgaagcatgggcgcaaactggtcattgcgttgccatatatctggttgatcttgctgtttctgctgccatttctgatcgtctttaaaataagtctggcggagatggcgcgcgccattccgccttataccgaactgatggagtgggctgacgggcaactgtccatcactcttaatctcggtaatttcctgcaactgaccgacgatccgctctatttcgatgcttatctccagtcgctacaggtggctgcgatttcgacattttgctgtttactgatcggctatccgctggcgtgggcagtggcgcacagtaagccttcgacccgtaatatcttattactactggtgatcctgccgtcgtggacctcgtttctgattcgtgtctacgcctggatgggaatattaaaaaacaacggtgtgctgaataattttctgctgtggctgggggttatcgatcaaccgctgaccattctgcataccaatctggccgtttatatcggcattgtttacgcttacgtgccgtttatggtactgccgatttataccgcgttgattcgtattgattattcgctggtggaagcagcgctggatctcggtgcacgaccgctgaaaacgttctttaatgtgatcgtgccgctgactaaaggtgggattattgccggatcgatgctggtgtttatcccggctgtgggcgagtttgtgatcccggaactgctcggtggcccggacagcatcatgatcgggcgcgtgctatggcaagagtttttcaataaccgcgactggccggtggcctcggcggtagcgatcatcatgttgctgctgctaattgtgccgataatgtggttccacaaacaccagcaaaaaagcgtgggagaacacggatgaataatttaccggtagttcgttcaccctggcggattgtgattttgctgctgggctttacctttctctacgcgccaatgctgatgctggttatctattcgtttaacagctcgaagctggtgacggtgtgggccggctggtcaacgcgctggtatggtgagttattgcgcgatgacgcgatgatgagtgcggttggtttaagcctgacaattgctgcctgtgcggcaacggcggcggcaatcctcgggactattgcagcggtcgtgctggtgcgctttggcaggtttcgcggatcaaatggttttgcctttatgatcaccgcgccgctggtgatgccggatgtgatcaccgggctgtcgttgctactactgtttgtcgcgcttgcacacgccattggctggcctgcggaccgcggtatgctcaccatctggctggcgcatgtcactttctgtacggcttatgtggcagtcgttatttcgtcgcgtctgcgggaactggatcgctcgatagaagaagcagcgatggatctcggtgcgacgccgctgaaagtgttttttgtcattacgctaccgatgatcatgcccgcgattatttctggctggttactggcttttactttgtcgcttgatgatctggtgatcgccagctttgtttccgggccgggagccaccacgttaccgatgctggtcttctccagcgtgcggatgggggtaaatccggaaatcaacgccctggcaacattgatcctcggcgcggtcggaattgtcggatttatcgcctggtatctgatggctcgcgcagaaaaacagcggatacgcgacatccagcgtgcaagacgtggctgaagacactaaaatttgccaacctggctacataatgccgcgcatgtcgcggcattgttttcatggaagacgaaacgttgggattttttaagaaaacatcttcatctcatgctcgcctgaatgtgcctgcgctggtgcaggtggcggcgctcgccattattatgatccgtggcctcgacgtgctgatgattttcaatacgctgggcgtgcgcggtattggcgagttcattcatcgcagcgtacaaacctggagtttaacgctggtctttttaagcagtctggtgctggttttcattgagatctggtgtgcgttttcactggtgaaagggcgtcgctgggcgcgatggctgtatctgttgacacaaatcacggccgcaagttacttgtgggcggcttcgctggggtatggttatccggagctgttcagcattcccggtgaatcaaaacgtgaaatcttccatagcctgatgctgcagaagctgccggatatgctcatcctgatgctgctgttcgttccctcgaccagtcggcggttcttccagttgcaataatgtgtataatcgtcgcccctgatgatgtgaaggtcaatgtatgcagtgcgcactttacgacgcgggtcgctgtcgttcctgtcagtggataacgcagccgattccacagcaactctccgctaaaaccgccgatcttaaaaatctgctcgccgattttccggtcgtggaatggtgcgcgccggtgtcaggcccggaacaagggtttcgtaataaagccaaaatggtggtgagtggtagcgttgaaaaaccactgctcggtatgctgcatcgcgacggcacaccggaagacctttgtgactgcccgctttatcctgcctcatttgcgcccgtttttgcggcgctaaaaccgtttatcgcccgagcggggctaacgccttataacgtggcgcgtaagcgtggcgaactgaaatacattctgctgactgaaagccagagtgatggcggcatgatgctgcgctttgtactgcgttctgataccaagctggcgcaactgcgtaaggcgctgccgtggttacacgaacaactaccgcagctgaaagttattaccgtcaatattcagccggtacatatggcgattatggaaggggagacggagatctacctgaccgaacaacaggcactggcggagcgttttaatgacgtaccgctgtggatccgtccgcaaagtttcttccagactaatccggcggtcgccagccagttgtacgccaccgcgcgcgactgggtacgacagctgccggttaaacatatgtgggatctgttctgcggtgtggggggctttggtttacactgcgcgacgcctgacatgcagttaaccgggatcgaaattgcatcagaggccattgcctgtgcaaagcagtcagccgctgaactgggcttaacgcgtttgcaatttcaggcgctggactccactcagtttgccaccgctcagggggatgtgccggagctggtgctggttaacccgccgcgccgcggcattggtaaaccgctgtgtgattatctctcaacgatggcaccgcgttttatcatctactccagctgtaacgcccaaactatggcgaaagatatccgcgaactgcctgggtttcgtattgaacgggtgcagcttttcgatatgttcccgcataccgcgcactatgaagtgctgacgctgctggtgaagcaataaaaaagccgcatgtgcggcttcagattgctgacaaagtgcgcgttgtttatgccggatgcggcgtaaacgccttatccggcctacaaaagcgtgcaaattcaatacattgcatgggccatgtaggcctgataagcgtagcgcatcaggcaattttacctttgtcatcagtctcaagccgcggttgcggctttctgaatcttactgtgggaaccactggtcactgattttttgataagtaccgtcagctttaattgctgccagcgcgttattcagtttttccagcagggctttgttatccggacgtacagcgatgcccaggccggtgccaaaatattgcggatcggtcactttctcagtagcaacaccaagttgtggattggttttcagccattcgtttaccaccgctgtgtcaccaaataccccatcaatacgaccatttttcagatcgataaaggcattctgataactgtcataagagacagttttcacttccgggtgctgatcctgaatatatttctggtgcgtagtaccgttttccatcccaatacgtttgcctttcagatcggcaaacgttttgtaggtatcttttttggcaatcacgacggctgagttttcatagtagggcgtggtaaacgatacctgtttgctacgctccggggtgatatccataccggagattacggcgtcatattttctgaatttcagggacgggatcaggctgtcgaacgcgtgattagtaaaagtacattctgcctgcatttgtttgcacaaggcttttgccagatcgatatcaaagccgacaatctcattattagcacctatagattcaaagggtggataggtggctgaaacgccaaaattgattttctctgcggcagaagcaccgaaagtaaaggaagcaagtaaagcggcaagaactaactttttcatgatggaactcccgtctgtcaatcttatgatttttggccgtgtctgcggcatgggataacaatgccatcaagtgaatttatatgcaataaacatgattaaataatttaaatgaaataaaaaagacggacaacttagtgggttgtccgtcttcattataagaatttatgcactatgtaggccggataaggcgtccccgccgcatccggcacaggcaccgtgctgatgtctgatgcgacgctggcgcgtcttatcagacctacaaaaccccccggcgaatgtacgcagccacattaatttcgccgttcgaatgccagcgctttgcgctcgatcagacgcatcatcagcgtcagcaggccgttaacgaccaggtaaataatccctgccgcaccgaacaccattacatcgtaggtgcgtccgtacaacaactggctgtatcccatcacttccatcagcgtaatggtgtatgccagagaggtacttttgaataccagcaccacttcgttggaataagaagagagcgagcgtttaaaggcatacggcagcaggatcgccagcgtatcttttttgctcattcccagggcgctacaggactgccactgaccttccgggatcgcacgaattgcaccgtaaaacagctgcgtggtatacgccgcactattcagcgacaacgcaatcagcgcacataaccacggttctgacaacaaatgccacagtgccggatactcctgcaaagtcggaaactggcccggcccgtaataaatcaggaagatctgcaccagcagcggcgtaccggtaaacagcgtgatataaccccgcaccagccacaccagcaccggcgttttcagcgtcaggatgatggtaaaaatcaatgccagaatcagtgccacaatcagcgaggcaacggttagcgtcaggctggtgtgtagccctttcatcagttcgggtaaatactcaaacattagctgggcctccgctcaaaacgtgtcgcgcgcaggtcaatgcgtttgagaatgtactgactgagcagggtgatcaccaggtaaatcgccgccgccacaatgtaccaggtaaatggttcctgggtacgagtagcgatgctttttgtttgcagcattaaatcattcacactaatcaaactgaccagcgcggtatctttcagcagcaccagccactggttaccgaggccaggcagcgcatgacgccacatctgcggcatcaccagacggaaaaagatagccgatttcgacagccccagcgcctgaccagactcccactgacccaccggcaccgctttcaacgcgccccgaagcgtttgcgaggcataggcggcatacagcagtgacagagcgatgacaccacaaaggaacgggctaacgtcgaagttctcaatgtccatctgcactgggatctgcacgaacccaagattgatagtgaagccatccgaaagcgtcagcagcagctgcgaggagccaaaatagataaacagcaccaccagaatttctggcaggccacgcagaatggttaccagcgctgaacctgcccacgcgacaggacgccattttgccgactcccataccgcaaagaacatcgccagcgccagcccgacaatcaatgcacaaacggcaaggccgacggtcatcccggcggcgcttgctaaaggaaaaaattcattcatcaggaattacttctggaaccatttgttgtagatggtttcgtaagtgccatctttcttcactttttccagcgcagtgttgagtttctgctgcagctcagtgttgccctgacgtaccgcgatgccgaggccagtgccgaagtaatctttatcggtcactttgtcgcccaccgccgccagtttcgggttatctttcagccactcagtgaccactgcggtgtcaccgaagacgccgtcgatacgcccgttttgcagatccagttttgcgttctggtagctgtcatacggaacggtagtgatttccgggtgcttatccataatgaatttctggtgtgtcgtcccgttctgtacgccgacttttttgcctttcagctgatcaacactggtgtatttgccttgctgacccacaaacagggcagagttgtcatagtacggggtggtaaacagcacctgcttttcacgctccggagtgatatccatgcccgccatcacggcttctacgcgacggaatttcaggcttgggatcaggctgtcaaacgcctggttagagaaagtgcaggttgcatcaatctctttacacagcgcttgtgccaggtcgacgtcaaaaccaacgatctggttgtttgcatcaatcgattcaaacggaggataggaggcttcggtagcaaaacgaatggtttcggcagctgtggcggaaagactaaaacctgcaattaacgcggcaatcagaacttttttcattgttgttatcccgaatcttagtgagagagatagtttttaaatgcttcggtttgcggctcggtaaagcagctcgcgtcgccttgttctacgatatgaccattttccatatacaccactcggctggcggttttacgcgccacttcaacttcgtgggtgacgatcacctgggtaatattcgtttctgccagctcacgaatgatgctgacgatttgtgccgtaatttccgggtccagtgcggcggtcggttcatcgaacagcagtacctgcggttccatcatcaacgcacgggcaatagcaacacgctgctgctgaccaccagaaagatgcagcgggtaacgatcgctataaggtttgagacgcagacgttccagcagtttttctgcacgggccagcgcctgatctttactcaaccccagtacacggcagggcgcttcaatcaggttttgctgcacggtcagatgcggccacaggttgtattgctgaaacaccatgccaacgttacgacgcaaatcgcgaatcgcattgtcagagggtgttttggtgaaatcgaaatggttgcctgcaatgttgagcgtaccggagcgcggcatctcaagcagattgagtacacgcagcagcgagcttttacccgcgccgctggggccaagtaacaccagcgtttcgccctgtgggcaatccagcgtgatatcgaacagcgcctgatgcgcgccgtagaagcaattaatgccgtttaattgaatactcattgacactcgtatactggcagtctgatagctattgaggtcgaagatagtacctttggcagaataattatgcaatatttctgctttaaaagttaaaagcaaagcgcattattcaataaacatagcacaaaataacgggggcggtggtcggcgagcataaatgtcggcattcctcacgaaatgccggacaatttacggggtttattggttgatcaaggcgttagcgattctcgatggactgacggagcgtacccgccgtggcatgaacgctaccgcctaagtaacgcacatcgtcgatgacccaacactggccttcctgaatcattaacacttcatcctgccagccctggtcaccctgtttaagatccacgcgcaaaggaatgttacgggcatcacgattagggatagtcgatgcactggcaacgtgggcgctgtctggcaaggtggttcgactggagaatggatcgttggtcagtagttcccgatggttattatcccgggaggcatcgctaagcagtgtcgccagtttgtcgctcagataagggcgcaaggcggtgatgtcgttgctgcggtgcaaaatgcggtagtcataaaattgctgggccacgttatccgggcctccttcaacgcaaggaccactgcgtgtgccgttatctttataagctggagtgactgtggtgcaggcactgaggagcagtgcgcaggggataagcattgtcaatttgctgtagcgcataatgatttccttataagcgatcgctctgaaagcgttctacgataataatgatatcctttcaataatagcgtatcagtctgataatgcttttgagatcgaaggcttagcaaacaaggagatcgatcatgcaattttctacaaccccaactctggaaggccagaccatcgttgaatattgcggtgtggtgaccggcgaagcgattttaggtgccaatattttccgtgatttctttgccggtatccgcgatatcgttggcggacgttccggtgcgtatgaaaaagaactgcgtaaagcacgggagatcgcctttgaggaattaggctcccaggcgcgggcgctgggggccgatgccgtcgtcggtattgatatcgactacgaaacggtcgggcaaaacggcagtatgctgatggttagcgtcagcggtacggcggtgaaaacgcgtcgatgagaagagtcttctggctggtcgctgccgctctgttattggcagggtgtgcaggcgaaaaaggcattgtcgagaaagagggatatcagcttgatacccgacgccaggcgcaggcggcgtatccgcgcattaaagtgctggtgatccactacaccgcagatgattttgatagctcgctggcgacactgaccgataagcaggtcagctcgcattatctggtccctgcggtaccaccgcgatacaacggtaaaccgcgcatctggcaactggtgccggaacaagaactggcctggcatgcggggattagcgcctggcgcggggcaacgcgccttaacgacacctctattggcattgagctggaaaaccgtggctggcaaaaatcggccggagtgaaatattttgccccgtttgaaccggcacagattcaggcgcttattccactggcgaaagatattattgcccgttatcacatcaagccggaaaacgtagtggcacatgcggatatcgcaccgcagcgcaaagacgatccggggccattatttccctggcagcaactggcgcagcaggggattggtgcctggccggatgcgcagcgggttaacttttaccttgccgggcgcgcgccgcacactcctgtagatactacgtcattgctggagcttttggcgcgctacggttatgacgttaaacctgatatgataccgcgcgagcagcggcgcgtgattatggcattccagatgcatttccgcccgacgttatataacggcgaagcggatgcagaaactcaggcgattgccgaagcattgctggagaaatacgggcaggattagcgcggcagttttccgtggtcgcgtagccaggcggcagttttctcgataccttcatccagggtgatgaccggctgataacctaactcttcctgcgcacgcgtaatatccagcgtaaagtcaaaattcaacttggagacgccgtagtgggtcagcggcggctcttttgctgacttgcggcctaaacgctccatgctgcgggcgatcatatccagcatcgggtaggggacggaacgaatacgacagtcaatattcaactcgtcgatcagcttctgcacgatgctgcgcagtgtgcgatgctcgccgttggtgatgttgtacacacgcccggaaggtagcttatcgcaggcttcctggcttgccagccacattgcgtgcacggcattttcatagtaggtcatatcgaccagcgcactgccgccatgcggtaacagaatactgccgtagtggtgcatcatatgcgccagacggggaataaagactttatcgtgcggtccgaacagactttgtgggcgcagaatagtaaagcgcgtttgtggattcgcctgcgaaagcatattgatcacttcttcgctggctgctttgctgcgggcaaactcgttggcgaagcggtgagggcgaaaatcttctttaatatcgcgatggtggtgataatcgaagtacagggagggggaagagatatgaataaagttacgcacaccccaggcgacagcccattcacccaggcggcgagtggcgcgaacgttagccagatcgaaagcctgttgtgtcccccagggtgaggtaaagctggagcagtgccacagcgtatcaatgcccgcgagcatcactttagcttgtgatgaaaccagctcggtcagatccgccggaacaaactctgcgcccattttttccagcaatttgcccattgcctcgttgcgaccggtcgctcgcacgctgatgcctttctggcataaaaactctaccgcgtttcgacctaagccgctggtggcgccggtaaccagtaccttcatatcaatccactgttgttgagaaaataacgtgcgcattcttccgtgatttcccccatgatgcaatgggaaacatgaaagaataacgcaggttttgtcgattaatctgtgctttgttctgccagtctggcgatttgttttgccattccgcgaaaaataaacagatgcgcggggatcatcaataaccagtaaaacagccccggcataccgtgcggatgccagaaagcgcggacatcgatagtacgatagtcgcctttatcttccaggctaaaacacagtcgtcccagccccggcgctttcatgccaaataacaacgtaagttgtttttccggttcaacgacaatcactttccagctatccaccgcatcgccagtctgtaaatattcgcgctccgggcggcctttcgccagcttatgaccgatcgcgcggtccatcaacgcccgtgtctgccacaaaatattgccaaagaaataacgctctttaccgccgatttggttcactacctgccataaagcagcaaggctggcggacgttttaacggtaaaccccgcctgtttggcaaaataaccgtactccggtcgccagcgggcaaaggcctgagcgtcgtagccccagtcgctggagttgaccagtttttcctcctctttcaacgtgctacgtaccgcgtcatcgaaagcgatcagccgttgtgggatgagtgcacgtagcgcggtatcatccgccagcagatcgtgtttcagcccctgaatcaacgccctggcggtggtgggcggtacggaagtaatcacattgagaaaccacaccgaaatccagcgggtggggagggggatggggatcaaccagcggcgcttaccgctcaccgccataaaatgttcaaactgttgctgataactgagcacctctggtccggcggcttcgaagatgcggtgttcgctggccggatgatctaacaacgccaccagatagtgcagcaagttttccagcgcgatgggcgtggtgcgtgaacgtacccagcgtggcggcgttaacactggcaggttgtagaccatatcgcgcatgacttcgaacgccgctgaacctgcgccaacgataattccggcccgaagttcggtcacaggtacattcgcttcacgaagaatgtccgccgtagcctgacgagcacgcagatgatccgactgctcatgtggcggggcctgcaacgaactgagaaagattaattgcttaactggtacttcacgtagcgcatcgcggacgttgagagccacctggcgctcctgagcgataaaatcgccgccttcgcccatgctgtgcaccagaaaatagacggtatcgatatcctgcaacagggccggaaggttatccggccagctgagatcgactttatggcaactgacgtttgccagttgcagctttgcaagcctgtcgacatgacgtgccgccgccaggatctgatgcccttgccggctgagtgtgcgcaccagatgctgaccaatgtagccactggcaccgagaactaaaatgcgttgcggcacgtctctctccttaacgcgccaggaatgcgcgccagtgggcggcgacttccgccagttgttcgcgcgagacgtcaagatgcgtcaccaggcggacaatcggcgaggcgttaatcagcacgtttctcgctttcatgtattcgcctaacgcggcagcattttcttccccgacgcgaacaaacagcatattagtgtcctgacgcatcacatccgcgcctgcttcacgcagttgctccgccatccaggcggcgttgtcgtgatcttcctgcaaccgtgcgacgttatttttcagggcatacatcccggcggcagccagaatcccggactgacgcatcccgccaccggccattttccgccagcggatggcacgtttaatgtaatcacgattaccgacgagtaatgaaccgactggcgtcccaagacctttcgacaggcaaatggtgaacgaatcacaatattgcgtgatctctttcagttcgcagccgtaagccaccacggcattaaagatgcgcgcaccgtcaacatgcagcgccagattgcgctcgcgggtaaattcccatgcttctttcaggtattcacgcggcagcactttgccgttgtgggtgttttccagactgagtaatttggtgcgggcgaaatggatatcgtcgggtttgattttcatcgccactttatccagcggtagcgtgccgtcggcagccgcgtcgatgggttgcggctgaatactgcccagcaccgctgcgccaccggcttcaaacagatagttatgcgcggcctgaccgacaatatactcttcgccacgttcgcagtgactgagcagagcgaccaggttggcctgagtgccggtcggcagaaaaatggcggcttctttaccggaaagctctgcggcgtagtcctgcagagcattaacggtagggtcgtctccgtaaacgtcgtccccaaccggggcggccatcattgcttcgagcatggcgcggctcggtcgggtaacggtatcactgcgtaaatcaatcatggcatgtccttattatgacgggaaatgccaccctttttaccttagccagttcgttttcgccagttcgatcacttcatcgccgcgtccgctgatgattgcgcgcaacatatacaagctaaatcctttggcctgttcgagtttgatctgcggtggaatggctaactcttctttggcgaccaccacatccaccagcaccggaccgtcgatggagaaggcgcgttgcagggcttcatcaacttcagacgctttttctacacggatacccgtaatgccgcacgcttcggcaatgcgggcaaagtttgtgtcgtgtagttcggtgccgtcagtcaaatagccaccagctttcatctccatcgccacaaagcccagcacgctgttgttaaagacgacaattttcactggcagtttcatctgcactactgagaggaaatcgcccatcaacatgctaaaaccgccatcgccgcacatggcgaccacctgacgttctggctctgtcgcctgcgcacccagcgcctgcggcatggcgttagccatcgaaccgtggttaaacgaacctaacaggcgacgcttgccgttcatttttagataacgtgccgcccacaccgttggcgtaccaacgtcacaggtgaaaatagcgtcatcggcggcaaaatgactaatttgctgcgccagatattgcgggtgaatggctttctcgctcggtttagctaaatcgtccagccctttgcgggcgtcgcggtaatcttccagcgctttatccagaaacttgcgatcggctttttcttccaccaatggaagcaatgcacgcagagtcgacttgatatcgccgaccagtgccatatccaccttgctgtgagcgccgatgctggctgggttgatatcaatctgaatgattttggcatcggtcgggtagaaggcgcggtagggaaattgcgtgccgagtagcactaacgtgtcggcgttcatcatggtatggaaacctgacgagaagccgattaacccggtcattccaacatcatacggattatcgtattcgacatgttctttaccgcgcagggcatgaacaataggcgctttaattttcccggcaaactcaactaactctttatgcgcccccgcgcagccgctgccacacatcagggcgatattgctggaataacgcagcagttgcgccagtttgcgtaactcttcttcttccggcgtcacgactggttgtggcgcatgataccagtgcgtggttgccccttctggcgcaggttttaacgccacgtcgcctggtaacacgacaaccgaaacgccacggttaagcaccgctttgcgcatggcaatcgccagtacttgtgggatctgctccgggctggaaaccagctcgcaatagtgactacattcgcggaatagctcttgtgggtgggtttcctggaaatagccgctgccaatttcgctggagggaatatgagcggcaatcgccagtaccggaacgtgattgcggtggcaatcgaacaggccgttgattaagtgcaggttgccggggccgcacgatccggcgcagaccgccagttctccgctaagttgtgcttcagcgccagcggcaaaggccgccacttcttcgtggcgggtggacatccactcgatggtgcccatgcgattaagactgtcactaagaccgttcagagagtcgcctgtgactccccagatgcgtttcacccctgccgattcgagtgttttggcgatataagctgcaaccgtttgtttcatggttctccatctcctgaatgtgataacggtaacaagtttagttcatctgacggagggggaagggatgggagagaaaggaggcactaacggttaaatagcccgatgaaaggaatatcatcgggcataaggcgattatgcgagaaccaaatccccctgcggatggcaggagcaggccagtacgtaaccttcagcgatttcggcgtcggtcagcgtcattgtactgctcaccgtatattcaccggaaaccacttttgtcttacagcagccgcaaacacccgcacggcaggcagcgacaaccggaacgttattgctttccagcgcctccagtagcgtggtgccaaccggggcgtaaaattctcgtgccggttgcagtttggtgaatttcagaccgctggtcgccgcttctgctactggggtgaagaatttctctttaaagaaacgcgtcacgccgagcgctttcacttcctgctctacccaatccatatacggagccgggccgcaggtcatcacggtacgtgaagctaagtcaggtacacctgccagcagttcgcgagtgagacgaccagcgataaagccttcggtaacgttattttctgccaccagcgttaccggatagttacgccactcatcggcgaaaataacatcctgcggcgtacgcacgttgtagatcacccgcacatcggcctgtggacggttcttcgcaagccagcgacgcatcgacataatcggcgtgacgccgcagcctgccgccagcaacaggaatttatcttctgctttatcgtcgcaggtaaattcccccatcgcgtccgaaagccagagataatcaccgcgttttacatcgcgcgtcagccactgggagccgacaccgtcatcaatccgccgcacggtcagggtgatatattcactcacgcctggcgtggaggaaatggtgtaagcacgcagcgtttccgctgagtttcgcacgctgaccagtgcatattgcccggcgcgatatgggtagtaatcgtggcaaatcagggaaatcgtccacacatccggcgtttcttgcgtaatgtgatgaacctgcatccgccacgggcattgattcgttggcatcgtcatcgacaaactccttacgcgctcaacagttgcttcatgtcttcttcaacagtggtgatagaacgcaggccgaatttctcgttcagcaccgccagcaggtctggtgtcaggaaaccaggtgcagtcgggccggtgacgatatttttcacgcccagagaaagcagcgtcagcagaatgacgatcgctttctgttcaaaccaggagagcaccagcgacagcggcagatcgttgacaccgcagcccagtttctctgccagagtgacagccagaataatcgctgagtaagcatcgttacattgacctgcatctaccagacgcggcagaccttcgatatcgccaaactcaagtttgttaaagcgatatttaccacaggcgagggtcaggatcaggcagtcatccggcacgctggtggcgaaatcggtgaagtagtggcgctcgccgcgtgcgccgtcacagccaccaagcaggaagatatgacgcagtttttcacggctcaccagatcaatcagcgtatcagcagcgccaagcagcgtctggcgaccaaaacccacggtgataaggtgcggaatttcgctgtacgggaagcctgccatctgttgcgcctgggtgataaccgcagagaaatcatcaccgtccagatgacgcacgccaggccagccaacaatgctgcgggtccagatacgatcgtcataagcgcctacggttgggtcgatgatgcagttcgaggtcatcacgatggggccagggaaacgagcgaactccacttgctgattctgccagccgctgccgtagttaccgaccagatgcttgaatttacgcagctccgggtagccatgcgcaggcagcatttcgccgtgggtgtagacattaacgcccgtgccttcggtctgttccagcaggttgtagagatctttgagatcgtgaccggaaatcagaatgcatttacccgccgtcgctttgacgttgacctgggttggcgtcgggtgaccgtatttaccggtttcgcctgcatccagaatgctcatcactttgaagttcatctggccgatttccattgaacactcaagaagcgcgttcatatcggcaggccaggtccccagccacgccatgattttatggtactgggcataaatatcgttgtcgtattgaccgagaacatgcgcgtgttccatataggccgccgcacctttcaggccatacaggcacagcagacgcaggccgagaatgttttcgccaatcgccgctttatctttgttaggggtaaattctgctgcctgacgttgcagctcgccgagatcgtcgctcaccagttgcaggtcagccatcgggttatcgacgcgcgcgttggcatctacagccaggcattgcgctttcagcgcctcgcgcagggcaatcgcttcacgagcgtagccgacaatacgcggagaatcgaagttaacgttggtcagggttgagaaaaaggcacgtggcgcgaagctgtcaacatcgtggttgatgatgccgtattcacgcgcttttaccgcccaggcagaaagcccttgcagcgccgcgatgagtaaatcctgaaggtcagaagtttccgccgttttaccacacatcccctgcgcgtatgagcagccgtttcctgccggagtacggatagtttgttcacattgcacacaaaacatgatcacaccttttaaagttatatttaatatacatgtttaaggttaagacgcttaacgcggggataaaagggatttttcatgcaactttaagggagattgatttagcgcaattttggcggcagggatctaccgccagagaggtattacgcagagaaaaaggcgatgaggatcggcactaacaggctaagaataaaaccgtgaacaattgccgccgggaccatatccagcccgccagtacgttgaagaacgggcagggtgaaatccattgatgtggcaccgcataagcccagtgcagtagagcggctgcggcgaatcagcccagggatcaacataatagcaatcagttcacgggccagatcattaaaaaacgccgcgctcccgattaccgggccaaaagattcggtcaataaaataccggaaagagaataccagccgaaaccggaggccattgccagcgcggtattgatggggagatcaagaataaaggcgttaattaaaccaccaattaatgaactggcaaccaccaccacggcgacaatcattccccggcgattaaggacaatctgctttaaggtcatgccattattgcgcaactgaataccgacgaggaaaagtagcagaattaacgtgtattcgctggcttcggtcgcgtgttgtaagaaagccagtccactcagaccaatggcaaaaccaatcactactacgccgcacagttttagcgactccagcgccatcgcaatacgcgacgggagtttttcttgctgatggtgattgcgccatggcaggcctcgctccagccacatcagggcggcaatattacatagtaaaataacggtaatactgacagcagaataatgcagaatcgccaacaggttactggcgaggttatcgagaaacgccagactgatacccataaaaaagagaataaggtaaaccatccagcttaatagctgattaataacttttaatgcagctttttggcgaagcggaatgaggtaacccacaatcaggggaaccagaatgattaacagcccagaaaacatgaaaacccagtccttgcaaagatgaagtcgaaatgcgcgatgacacactactgaaagcggaaggacgagtaaagttgcaattaaaaggaaatgttatgcataaggagcagtagagtattcgttttcatttaaagatattcttgcgctttaattacaaactgcaccgatgttggtggcgtcaaaatcgccgaggcgttccctgaaggccggggcagcccacatggatgtgggctgagggcgcgttttacagggatgttacctcgcgcccgacccggtagccgtaagggataagtcgagggcaccgcgcagcggcgattttgttcgccagagcccgggggtgcagggggcggcggcgattggccgccccctgcgcgctccttgcgccagtggcaatatgtggcttagctcatgaaaggagcgcaacaagatgatgaatcaacatataacaacatcttaaaaaaaggcctgacattacgccaggccttctgcgttaattaatcacgcttttccagcagggtccggtaaatcagaccaccgataatgccgccgacaattggcaccacccagaagaaccacagttgttctaatgcccagccgccctggaagatagcaaccgcggtgctgcgcgccgggttaacagaagtgttagtcaccggaatactgattaagtgaatcagggttaaggccagaccaatagcgatcggcgcaaaacctgccggagcgaatttgtcggttgcgccgtggatcaccaacaggaaacctgcactcaataccagttcaactaccagcgcggaaagcatggaataaccgcctggtgaatgctcgccataaccgttagaagcaaaaccgctggctgccgcgtcaaaacccgttttaccactggcaattaaatacagcagcgctgccgcaacaataccgccgacaacctgggcaattacgtagccaacgacttcttttgccggaaaacgtccgccagcccataaaccaatagtgaccgccgggttaaaatgaccaccagaaatatgaccaacagcaaaggccatcgtcagaacggtcagaccgaacgccaacgccacgccggcaaaaccaatgcctaattccgggaagcctgcggccagtacagcactaccacagccaccaaaaacaagccagaaagtaccaaaacattcagctgctaattttctgaacatatccacctcaattaaaaattgaccctgtgaaaaatatggtcgttttatagggccgtcgtaaaaagtgacgacggaaataatgcgcggctattttaaaaacgaaggcgagtcattcaccagataaataaatccagtaaatttgatttagggcaacagcgggttaccccatatagtcgtttgtctgattgacagtgtagtgcaagcaaaagatttaatcctttaggcgtaataaaaaataatttatcatgctaattatttgattttgttgtttttgcagacttatcagcaagagggagtataacgcgattattcgctcatttttcagacatttgccatgcttaaatgtgatgtcatcacgtattagcaaggcctttcccgttatactgccagcgtaaaggataagtcacatatttctggaggggatatgattcttgagcgcgttgaaattgtgggttttcgcggtatcaaccgtttgtcgttgatgctggaacaaaacaacgtcctgattggggagaacgcgtggggtaaatccagcttgctggacgccttaaccctgctgctatcgccagaatcagatctctaccattttgagcgcgacgatttctggttcccgccgggagatatcaacgggcgagaacatcatctgcatattattttgaccttccgcgaatcgctgccaggccgacatcgggttcgccgttatcggccgctggaagcgtgctggacgccatgcaccgatggctatcaccgtattttttatcgtctggaaggggagagtgcggaagacggcagcgtgatgacactgcgcagttttctcgataaagacggacatccgattgatgtcgaggatattaacgatcaggcacgccatctggtgcgtttaatgccggtgctgcgcttgcgtgatgcccgttttatgcgccgtattcgtaacggcacggtgccaaatgtccctaatgtggaagtcaccgcgcgccagctcgatttcctcgcccgtgagttatcctcacatccgcaaaatctctctgatgggcagattcgtcagggactttccgcaatggtacagctgcttgagcattatttctctgagcagggggccggacaggcgcgatatcgtttaatgcggcggcgagccagcaatgagcaacgaagctggcgctatctggatatcatcaaccggatgattgaccgacctggtgggcgctcgtatcgggttattttgctcggcctgtttgctactttgttgcaggcaaaaggcacattgcgactggataaagacgcccgtccattgttgctgatcgaagatccagaaacccgtttacaccccattatgctttcagttgcctggcatctgttgaatcttctgccattgcagcgcattgccaccaccaactcgggtgagttgctttcgttaacgccggtagagcatgtttgccgactggtacgtgagtcctcgcgcgttgccgcctggcgtctggggccgagtggcttgagtaccgaagatagccgacgcatatcctttcacattcgttttaaccgtccgtcatcgctgtttgcacgctgctggttgctggtggaaggggaaacggaaacctgggttatcaatgaactggcgcgtcagtgcggacatcattttgatgccgaagggatcaaggtcattgagtttgcccagtccgggctaaagccactggttaaatttgcccgccgaatggggattgaatggcatgtactggtcgatggcgatgaagcagggaagaaatatgccgctacggtacgcagcctgttgaataacgatcgggaagccgaacgagaacatttaacggcgttaccggcgctggatatggaacattttatgtatcgccagggattttccgatgtgttccaccgcatggcgcaaatcccggaaaatgtaccgatgaatctacgcaaaattatctcgaaagcgatccatcgctcttccaaacccgatcttgccattgaagtggcaatggaggcaggacgtcgtggtgtggactccgtaccgacgctgctgaaaaaaatgttctcacgcgtgctgtggctggcgcgcggtcgcgcggattaaccgcgaaacatcgtggccatttgtggctgaatagcgtcgagcatctcatagcgccgacggtattcagcccgttttttactggcgatttcggcaatctcttttcgtgctatctgtgctggaaggcggtaatggcgttcagcatcacatacgccgccaaccgattcccagaaagcgttgtaatcagcgtggatcttgccttctttatcgcgataacgcaggctgcggtaaatatgcgtttcattgctgacggcaataatctgctctacctgcaaacgttgggcaaacagacaggccgcttccatcacgaggcgtttgggaaatagcccgtggcaggctttcgtcgcattctggatttcctgatgtggaatttcccattttgcgccttgcagtccgccaataaacatcgttcttttcccctgatattcacacagggtaaacgtgatctctgccagaggaataccttcgctgttgcggaacaggattgtgctgtcaccttctttatccattgagatcatcatggtcagctcaagcgtgaactgctcgccgtttttgccttccagcttcgccagttgcagcccgggggtattcaaatataagctgaattcttccgccgacatacattcgcggagtaacgcataatggtaacgtaacgcctccagcaattgcttacggctaagattcgccgcaaggtaagggcgatgcagacgcacaggcagtcgcggctggcgcgttaacaatacattgagattaggccagtgggaaagttcgttcatccactcaacgcttaaacgcggcataatcaacgagcgcagcaaaaatttctggcgaaaactacggcgatgccagaatttacccggccgacactgtccacgtgccagactaagaaaaagtgacaggctgctgagagattcagatggcgtaaaggtccgttcagttagctgcgacatattcatgaaatcaatggttatacatgacgtcgatttcaccattgcgtatcttaaccaaacatcaatagtgtgattactaacgtaaattttaggggtttgttgatatttcgttgaagttaatgacccggattggcatatggagtattcagaatatttatgaaaaagcggaaaaccgtgaagaagcgttacgttattgcgctggtgatagtcatcgccggactgattacgttatggagaattcttaacgcacccgtgccgacttatcagacactgattgtgcgccccggtgatttacagcaaagcgtgctggcgaccggaaagctggacgcgctgcgtaaggttgacgtgggcgcgcaggtcagcggtcagttgaaaacgctgtcggtggcgattggcgataaagtaaaaaaagaccagcttttaggggtcattgatcctgaacaggctgaaaaccagatcaaggaggtcgaagcaacgctgatggagctacgcgcgcagcggcagcaggcggaagcggagctgaaactggcgcgggtgacgtattcccgtcagcaacgtctggcacaaacgcaggcggtttcacagcaggatctcgacaccgccgcgacggagatggctgtgaaacaggcgcaaattggcaccattgacgcgcaaatcaagcgcaatcaggcttctctcgatacggctaaaaccaatctcgattacactcgcatcgttgccccgatggccggggaagtcacgcaaatcaccactctgcaaggccagacggtgattgccgcacaacaagcaccgaacattctgacgctggcagatatgagcaccatgctggtaaaagcgcaggtttctgaagcggatgtaatccacctgaagccggggcaaaaagcctggtttacggtgcttggcgatccactgacgcgctacgaggggcaaatcaaggatgtactaccgacgccggaaaaggttaacgacgctattttctattacgcccgttttgaagtccccaaccccaatggtttgctgcggctggatatgactgcgcaagtgcatattcagctcaccgatgtgaaaaatgtgctgacgatccctctgtcggcgttaggcgatccggttggcgataatcgttataaagtcaaattgttgcgtaatggtgaaacacgcgagcgtgaagtgacgattggcgcacgtaacgataccgatgttgagattgtcaaagggcttgaagcgggcgatgaagtggtgattggtgaggccaaaccaggagctgcacaatgacgcctttgctcgaattaaaggatattcgtcgcagctatcctgccggtgatgagcaggttgaggtgctgaagggcatcagcctcgatatttatgcgggtgagatggtcgcgattgttggcgcttcgggttccggtaaatcgaccctgatgaatattctcggctgtctggataaggccaccagcggcacctatcgcgtcgccggtcaggatgttgccacgctggacgccgatgcgctggcgcaactgcgccgcgagcatttcggctttattttccagcgttaccatttgctttcgcatttaaccgccgagcagaacgttgaagttcccgccgtctatgctggtcttgagcggaaacagcggctgcttcgcgcccaggagttgctgcaacggctggggctggaagaccgtacagagtattatccggcacagctttcgggtggtcagcaacagcgcgtcagcatcgcgcgggcattgatgaacggcggtcaggtaattcttgccgatgaaccaaccggcgcactggacagccattctggcgaagaggtgatggcgatcctgcatcagctgcgcgatcgcgggcatacggtgattatcgtcacccacgatccgcaggtcgctgctcaggccgagcgggtgatcgaaattcgcgacggcgaaattgtgcgcaatcctcccgccattgaaaaagtgaatgttgctggcgggacggagcctgttgtcaacacggtgtctggctggcggcagtttgtcagcggttttaacgaggcgctgacgatggcatggcgggcgctggcagcgaataaaatgcgtactttactgaccatgctggggattattatcggtattgcgtcggtggtttccattgtcgtggtgggtgacgccgccaaacaaatggtgctggcggatattcgttctattggtacgaatactattgatgtctatcccgggaaagattttggcgatgacgatccgcaatatcaacaggcgctgaagtacgacgacttaatcgccatccaaaaacaaccgtgggtcgactcagccacacctgccgtctcgcaaaacctgcgcctgcgttataacaatgttgatgttgctgccagtgccaatggcgtgagcggcgattattttaatgtctatggcatgaccttcagtgaagggaacacctttaatcaggagcagctgaacggtcgtgcgcaggtcgtggttctcgacagtaatactcgccgccagcttttcccccataaagcagatgtggttggcgaggtgattctggtcggcaatatgcccgccagagtcattggtgtggcggaagaaaaacagtcgatgtttggtagcagtaaagtgctgcgtgtctggctaccttacagcacgatgtccgggcgagttatgggccagtcgtggcttaactccattactgtcagggtgaaagaaggatttgacagcgccgaggcggaacagcaactcacgcgtttactttcactgcgccacggaaagaaggatttctttacctggaacatggacggcgtcttgaaaactgttgaaaagaccacacgtactttacaactgtttctgacgctggtggcggtgatttcgctggtggtgggcggtattggtgtaatgaatattatgctggtgtcagtgaccgagcggacgcgggaaattggcattcgcatggctgtaggtgcgcgagcaagcgatgttttgcaacagttcctgatcgaagccgtactggtttgcctggtcggtggcgcgttgggaataacactgtcactgttaattgctttcaccttgcagcttttcttacccggctgggagattggtttttcaccgttggcgctgctgctggcgtttctctgctcgacggtcaccgggattttatttggctggttacccgcacgaaatgcggcacgactggatccagtagatgctctggcacgagagtaatttttgagataaaaatgccagccgatcgggctggcattttgcctttaggatgtacacaatgagacagaagagctatgcgactgccgcttctacttcgacgggcacaataacactggcgtgattgccttttggcccctggtggacatcaaactgaacggattgtccagcttttagcgttctgtaaccatccatctgaatggtggaataatgagcgaaaatatcttcgccgccgccttcagggcagatgaaaccaaaccctttggcattgttgaaccacttaacagtacccttttccatgcttcgacatccttcgcaaatcttatacaagtaagatggaataaaccggggtcagagagggggctgttcaaaacctcgccaactctagaaatacaatttagagaattagggcgagccgtcaagcatttgacaggggacagggggcaggtatgaatcaaaaatttgaagcagttaacgctattgacaggaatgtgacagatgtcgctgatgccaacgatagatgatagttatctatcatgtggagtagattggtcaggcaaataagctcttgtcagcggcagggcgttctgccgataaccgtaaccgaagatgataactgacaatgggtaaaacgaacgactggctggactttgatcaactggcggaagaaaaagttcgcgacgcgctaaaaccgccatctatgtataaagtgatattagtcaatgatgattacactccgatggagtttgttattgacgtgttacaaaaattcttttcttatgatgtagaacgtgcaacgcaattgatgctcgctgttcactaccaggggaaggccatttgcggagtctttaccgccgaggttgcagaaaccaaagtggcgatggtgaacaagtacgcgagggagaatgagcatccattgctgtgtacgctagaaaaagcctgaatgcaggcataaaaattgggggaggtgcctatgctcaatcaagaactggaactcagtttaaatatggctttcgccagagcgcgcgagcaccgtcatgagtttatgaccgtcgagcacttgttactggcgctgctcagtaacccatctgcccgggaggcgctggaagcgtgttctgtggatttggttgcgctccgtcaggaactggaagcctttattgaacaaaccacacccgttctgcctgccagtgaagaggagcgcgacacacagccgacgctgagttttcagcgtgtactgcaacgtgcggtcttccatgtccagtcctccggtcgcaatgaggttaccggtgcaaacgttctggtcgctatctttagcgaacaggagtcgcaggcggcatatctgttgcgtaaacatgaagtcagccgtctcgatgtggtgaattttatctctcatggcacgcgtaaagacgagccgacacagtcttctgatcctggcagccagccaaacagcgaagaacaagctggtggggaggaacgtatggagaatttcacgacgaacctgaatcagcttgcgcgcgtgggcggaatcgacccactgattggtcgtgagaaggagcttgagcgtgctattcaggttctctgccgtcgccgtaaaaacaacccgctgctggtgggggaatctggtgtcggtaaaaccgcgattgcagaaggtcttgcctggcgaattgttcagggcgatgtgccggaagtgatggctgactgtacaatttactctctcgatatcggttctctgttagcgggcactaaatatcgcggcgactttgaaaaacgttttaaagcgttgctcaagcagctggagcaggacactaacagcatcctgtttattgatgagatccacaccattatcggtgcgggtgcagcgtctggtggccaggtcgatgcggctaacctgatcaaaccgttgctctccagcggtaaaattcgcgtaattggttcgacaacctatcaggagttcagcaacattttcgagaaagaccgtgctctggcgcgtcgcttccagaaaattgatattactgaaccgtcgatcgaagaaactgttcaaatcatcaatggcctgaaaccgaagtatgaagcgcaccacgacgtgcgttataccgcaaaagcggtgcgtgcggcggtagagctggcggtgaaatacattaacgatcgtcatctgccggataaagccattgatgttatcgacgaagcgggcgctcgcgcacgtctgatgccggtaagcaaacgcaagaaaaccgttaatgtggcggatattgagtccgtggtggcccgtattgcacgcattccagagaagagtgtttctcagagtgatcgtgataccctgaaaaacctcggcgatcgcttgaaaatgctggtcttcggtcaggataaagccattgaggcgctgactgaagccattaagatggcgcgtgcaggtttaggtcacgaacataaaccggttggttcgttcctgtttgccggccctaccggggtcgggaaaacagaggtgacggtacagctttcgaaagctttgggcattgagcttctgcgctttgatatgtccgagtatatggaacgccataccgtcagccgtcttattggtgcgcctccgggatacgttggttttgatcagggcggtttgctgactgatgcggtcatcaagcatccacatgcggtgctgctgctggacgaaatcgagaaagcgcacccggacgtgttcaatattctgttgcaggtgatggataacggtacgctgaccgataacaacggacgcaaagcagacttccgtaacgtggtgctggtgatgaccaccaacgccggggtacgggaaactgagcgcaaatccattggtcttatccaccaggataacagcaccgatgcgatggaagagatcaagaagatctttacaccggaattccgtaaccgtctcgacaacattatctggtttgatcatctgtcaaccgacgtgatccatcaggtggtggataaattcatcgtcgagttgcaggttcagctggatcagaaaggtgtttctctggaagtgagccaggaagcgcgtaactggctggccgagaaaggttacgaccgggcaatgggcgcacgtccgatggcgcgtgtcatccaggacaacctgaaaaaaccgctcgccaacgaactgctgtttggttcgctggtggacggcggtcaggtcaccgtcgcgctggataaagagaaaaatgagctgacttacggattccagagtgcacaaaagcacaaggcggaagcagcgcattaatctgattgtcaggtaggttggtgaagtccgtaatctcgaaagaggttacggactttttgtttatggggtggaacggtgaaaaccctatttttggaggtgaaggtaagttgttgataattagtgctgctggaaggtaaggataaaaaagggtgctgcaggagaatgggatggttttgctttattaacaacgggctaaacgtgtagtatttgagttcactgccgtacaggcagcttagaaattcacaggtaacatactccacccgcccaccatgttcactgccgtacagacagataaaatgcgaaaaaaaagctcgcactttcgtacgagctcttctttaaatatggcggtgagggggggattgactcgcttcgctcgccctgcgggcagcccactcactgcgttcgtggtctgtccaactggctgcgccagttgtcgaaccccggtcggggcttctcaccccccctggagtgcattatgcgaaaaaaagctcgcactttcgtacgagctcttctttaaatatggcggtgagggggggattcgaacccccgatacgttgccgtatacacactttccaggcgtgctccttcagccactcggacacctcaccaaattgttttgtcgcctgacctcatgggggcaacggggcgctactatagggagttggagtaaaacggtcaagaagaattttaatgataattattgtttgctcatactgtaaacaagttgtgcagtatatctacatcgagacaagttacggacttatacttccaaagtacttcatacatatcacaaaataaaaaggccggttaaaccgaccttttactcgttctttctcttcgcccatcaggcggtaaaacaatcagcgactacggaagacaatgcggcctttgctcaggtcgtacggggtcagttcaacagtcactttgtcgcccgtcaggatgcggatgtagtttttgcgcattttaccggagatgtgtgcagtaaccacgtgaccgttttctaactctacgcggaacatggtattaggcaacgtttcaagaacggtaccttgcatttcaatattgtcttctttggccatctaatcctctggggtatcactaccgtaatttgaaccggcaagataatgccgaagttctgtaaataagtaaagatttgcgcgctaaatcgcaacaaacaggttcggcacattactccgaaaacacacggctaagccgcaccaaaagcgcaacgtataagggagcggtgagataaacgatgggcgttacctgacgcgaaaaattccttatcggcagcggggtaatgagcgtaaccaactctgcgaccgcaattataacactctggggagaaatgtgccgaaaacattcattcttgtggtgaaaacaagcatcgtggtacccagaaattattcggcaatcgtccgaggcgcattttattgagataattaaggtaatcccggcggagaatttcgcaggcaccaagcgatgctgtgtgatcgttaaggacctggcagtcgataagcttaccgccatgaccgataaattcctcacagaataccagaagcgccgttttagacgcattttccatccggctgaacatggactcgccacaaaatagcgttccctgggccacgccgtacataccgccgacaagctcatcttcacgccagacttcaatggagtgggcatggccgagttcgtgaaggcgatggtaggcttcgaccacgccacgcgtgatccaggttccttcttcgcgatcgctggcacagccttcaatgacctgaccaaaagcgtaattcatcgtgacacgatagggcgagcgtttatgaaatcgcttcatactacggctgatatgcagtgattctggccatagcaccgcgcgaggatcgggcgaccaccagaggatggggtcgcctggagaaaaccacggaaaaataccacgctggtaagccattaacaggcgcgcagggctaagatcgccccccagagccagcaggccgttaggctcacgtaatgcgccttccggggaagggaaggctattgaatggcgagaaagctgaaccaggcgcatgaccgcaaaactccacgcaagtcggatcgttcaataatagcttacaaaccctgcttaaactggtaataacgcccctgtctggcaagcagttctgcgtgagtaccttgctcaataatttgcccgttgtccatcactattatttgttggaaacgagagagtccgcgaagtcgatgggtgaccattaacaccgttttctcatgcatcatttctgcaagcaattcaaggatctgactttcggttgtggcatctaagccttctgtaggttcatccagcaacaccagtggcgcatcatgtaacagcgcacgggcgatagccagacggcgcagttcaccaccggagagctggcgtccgccttcacctaaccaactgttgagacctgcatcctcgagcagcttctccagaccaacgcgacgcaagatctccgccagagcctcatcactactgccaggcgaggcgagtaacagattatcacgcagcgtggcgctaaacagatgcactcgctgaggaacaacgctgatggtctgtcgtagagccgcttcattcaggctggctatggggctatcgttaagcaaaatctcgccctgttgcgggtcccatgcgcgggtcagcagttgtaacagtgttgatttgccgcatccggttcgcccgagaatcgctatatgttccccggtgtttacctgaagagaaatccctttaagtgcctgttgagattgctccggataagtgaactgaacatcccgtaacgtcagcgaaacgcgataggcaacacgagtttgggtatcagggaaggtgacttccggtttttgatccgttaaatcagtgatccgaacggcagaggcaatgacttgccccagatgctgaaatgcacccgttactggtgccagtgcttcaaacgcggctaacgcgcagaagacaaacagggcaattaacgcgccgggttgagcattgccgccaacgccgccagacgccatccacagcatcaggatcaccgctaacgcgccaatgagcagcattatcgcttgcgacaatgcggtcagttcagattgacggcgttgcgcttccagccattgaatttctgtattctctaattgcgtgcgataacgatcgctggcaccaaaaatggtcagctcagcttgcccttgcagccaggccgtcagttgttggcgatactgcccgcgaagatgagtcagattttgccccgtgctttttcccgcacgataaaacagcggtggcatcaggaaaagcgtcagtaacataatgccgcccagcgtaaaggcgagggtgaaatcaaggaaacttaacccgattgtcaccaccataatcaccacaaaagcgcccaccagcggcgagataacgcgcaggtaaagatgatcgagcgtatcaacatccgccaccacgcggttgagcaattcgccctgacgatagcgcgccagtccggcaggggagaggggcaacaatttgctgaaggtgtaaatgcgcagatgctgcaacacgcggaaagtcgcgtcgtgacttaccagacgttcaaaataacgcccggcagtacgggtgattgcggcaccacgcacgcccgcagcgggtagcatatagttgaagctgtacagtccggcaacccccgcaaccgctgaggccgagaggaaccagccggaaagtgtcaacagaccgatactggcgagcagcgtcacaattgccagcacaataccaagacttaacatccatttatgacgtttatacagtgccagatagggtagcaaagcgcgcatttaaatctcctcctgacgatgggccagtaatgtggcgaatgggccaccagccacacttaattccgcgtaacgtccttgctcaataatccggccatcctgcataacccaaatgacatcccactcagcaagatcttctaactggtgggtgaccattaacgttgtctggcgcagagaggcggcattcagcgcctccattacgcgctgttcactgtgagcatcaaggctggcagcgggttcatccaacagtaatagcgaacagggatttagtaacgcacgggccaccgccacgcgctgcgcctgccccacggaaaggcgggcagcctggtcgccaacaggcgtatcaacgccttgtggcaggagcggtagaaactcgctgacccaggcgttatccagcgctgcttgtaattcttgttcgctggcatcaggtcgcgccagtagtacgttatcccgtaatgttgctgccggtaattgtgggttttgcccaacccaggagagatgtttacgccatgattctggtgataaatcgcgtaattctatcccgttgattcgtaatgatccctgatatgagagaaaaccagaaagcgcgttcagcagtgagcttttacctgaaccgctgcgaccaaccaacactgcacgttggcctgctggcaaagtaaagttcagcggtccggccagcgttttaccttccggcgacgtgataaacagatcctcggcctcaatggtcagcggatcggtcaatgctaattccgcctcaccgcgctgcggatgggcgagcggggtttccataaacgttttcagactgtcagctgcaccaacagcctgggctttagcatgataaaacgtaccgagatcgcgtaatggctggaaaaactctggcgcaaggatcagggccagaaaacccgcagccagcgtcacgccagtatcgtagtgaccaaaatccagctcgccgagataggaaaaaccaaagtagaccgccaccagagcaattgacagcgaggtaaaaaattcgagaatgccggaggataaaaacgccagtcgtagcacttccattgtccgttggcggaaatcttccgaagcagaacgaatactttcaatttcagcttcaccacgaccaaaaatacgcaatgtttccatgccgcgcaggcgatcgaggaaatgcccacttaagcgagcaagagcgagaaagttacgtcggttagcatcggcagcccccattccaaccagcgccataaacaacggaattagcggtgctgtgcccagcagaatgagcgccgcagcccagttagaggggaagatcgccaccacaatcagcaacggcaccgacactgccagcgccatttgcggcagatagcgtgcatagtaatcatgcatatcgtcaatttgctcgagtaccagcgtcgcccagctccccgcaggtttaccctgaatccacgctggccctgcttgttgcagacggtcgagaacctgacggcggatggcaaagcggatatgctgcccggcgtgataacccacccgttcgcgtaaccagaccacccatgcgcgcagtacaaaggtcagaaccagtaacgtaaagggaagcagcagggcttcacggggaatattctccataatcatatgttgcagaattcgcgccatgaaccaggcctgggcaatgatcaatatgccgctcacaaagcccagcagacgagaaatattcagccaacgttgggagatgacgctttgctgttttaaccagcgggttaactctttttgacgagatttattcattgcacgcttagcaggtgagttatcagaattatttgcagagcaatgttacaacggggaaaaaataaaggcgacccatagtcgcatggtgtcgccttctttacttttgttactgatttgtaaaattattttgcgtcagctaaaccatcgaggtagcgttccgcatcaagtgctgccatgcagcctgtaccggccgaagtaatggcctggcgataaatgtgatccatcacgtcgcctgcggcaaagacgccaggaatgctggtctgggtggcattaccatgaatacccgactgtactttgatgtagccgttttccagttccagctgcccttcgaaaatcgcagtattcgggctgtgaccgatagcaacaaacagaccggcaacgtcgagtgactcgatgttatcgctgttttgcgtatcgcgcagacgaacgccagtgacacccatttgatcgccggtcacttcttccagcgtacggttggtgtgcagaatgatgttgccgttctccactttatccatcaggcgcttaatgaggattttttccgcgcggaaaccgtcacggcggtgaatcagatgcacttccgaagcgatgttagacagatacagcgcctcttcaaccgcggtattgccgccgccgatgaccgcaactttctggttgcgatagaagaaaccgtcgcaggttgcacaagcagaaaccccacggcctttaaaggcttcttcagagggcaggccgagatagcgtgcagaagctccggtggcaataatcagcgcgtcgcaagtgtattcgccgttatcgccattcagacggaacggacggttttgcagatccaccttgttgatatgatcaaaaatgatctcagtttcaaacttggtggcatgttcgtgcatgcgctccattaataacggaccggtcagatcgtttggatcgccaggccagttttccacttccgtggtggtggtcagttggccgcctttttccatgccggtaatcagcacaggttgcaggttggcgcgcgccgcgtagacagcagcggtgtatcccgccgggcctgaacccaggataagcagtttactgtgtttggtcgtgcccatgagatccccatagttgttggcagacaatgggcaggattgtagggaatttacagacgtaaaaaaagagtatgacgattttgttaacaatttgtgcaatcggcagcatcgataagcaggtcaaattctcccgtcattatcacctctgctacttaaatttcccgctttataagccgattaaatgatgaataaacgcccctgttaatgaatatctggcatgttgtactaaaaatcgatgttttgctttgacaatcccctggtgttttgcgaaaacattcgaggaagaaaaaaacagtattcttatatgcgcataaccatgcatgtaaataccatgtttaccgtgctagtgaaatctacgtatggcgtggacagacgccattcgtgatgtcgatagctgccacaaggcaacggtcttctcaccgtagacccaggcattgcgcgccgtgaatcttcatgatttcggtctatcgtgacgggtagcgactctgaacagtgatgtttcagggtcagacaggagtagggaaggaatacagagagacaataataatggtagatagcaagaagcgccctggcaaagatctcgaccgtatcgatcgtaacattcttaatgagttgcaaaaggatgggcgtatttctaacgtcgagctttctaaacgtgtgggactttccccaacgccgtgccttgagcgtgtgcgtcggctggaaagacaagggtttattcagggctatacggcgctgcttaacccccattatctggatgcatcacttctggtattcgttgagattactctgaatcgtggcgcaccggatgtgtttgaacaattcaataccgctgtacaaaaacttgaagaaattcaggagtgtcatttagtatccggtgatttcgactacctgttgaaaacacgcgtgccggatatgtcagcctaccgtaagttgctgggggaaaccctgctgcgtctgcctggcgtcaatgacacacggacatacgttgttatggaagaagtcaagcagagtaatcgtctggttattaagacgcgctaacacggaacaggtgcaaaatcggcgtattttgattacactcctgttaatccatacagcaacagtactggggtaacctggtactgttgtccgttttagcatcgggcaggaaaagcctgtaacctggagagcctttcttgagccaggaatacactgaagacaaagaagtcacattgacaaagttaagtagcggccgccgccttctggaggcgttgctgatccttattgtcctgtttgccgtctggttgatggctgccttactaagctttaacccttcggaccccagctggtcgcaaacggcctggcatgaacctatccataatttaggtgggatgcccggtgcgtggttggcagatacgctgttctttatttttggcgtgatggcttacaccattcccgtcattattgtcggcggttgttggtttgcctggcgtcatcagtccagcgacgaatacattgattattttgccgtttcgctacgcatcattggcgttttggcgctcatccttacctcctgtggtctggcggcaatcaacgctgacgatatctggtattttgcctccggtggcgtcattggcagcttactaagcactacgctacaaccactgctacacagtagcgggggaactattgcgctgctctgcgtttgggcagcgggcctgacgttgttcaccggttggtcatgggtgaccattgctgaaaaactcggcggctggattttaaacattctcaccttcgccagtaatcgtacccgtcgcgatgatacctgggtcgatgaagatgagtatgaagacgacgaagagtatgaagatgaaaatcacggcaaacagcatgaatcacgccgtgcccgtattcttcgcggcgcgctagcgcgtcgtaaacggttggcggaaaaattcattaatccgatggggcggcaaacagacgctgcgttgttctccggtaagcggatggatgatgacgaagagattacctacactgcacgcggtgtggctgccgacccggacgacgtcctattttcgggcaatcgtgcaacgcagccagaatatgacgaatacgatccattattaaacggtgcgccaattaccgaacctgtcgctgtagcagctgctgctaccacggcgacacaaagctgggctgcgccggttgaacctgtgactcagacgccgcctgttgcctctgttgatgttccacctgcgcaacctacagtagcctggcagcctgtaccgggtccacaaacgggagagccggttattgctcctgcaccggaaggttacccacagcagtcacaatatgcgcagcctgcagtgcaatataatgagccgctgcaacaaccagtacagccgcagcagccgtattatgcacctgcagctgaacaacctgcgcaacagccgtattatgcccctgcgccagaacaaccggtggcaggtaacgcctggcaagccgaagagcagcaatccacttttgctccacagtctacataccagactgagcaaacttatcagcagccagccgctcaggagccgttgtaccaacagccgcaacccgttgaacagcagcctgttgtggagcctgaacccgttgtagaagagacaaaacccgcgcgtccgccgctttactactttgaagaagttgaagagaagcgagcccgtgaacgtgaacaacttgcggcctggtatcaaccgattccagaaccggttaaagaaccagaaccgatcaaatcttcgctgaaagcaccttctgttgcagcagtacctccagtagaagccgctgccgctgtttccccgctggcatctggcgtgaaaaaagcgacactggcgacgggggctgccgcaaccgttgccgcgccagtcttcagtctggcaaatagcggtggaccgcgtcctcaggtcaaagaggggattggtccgcagttgccacgaccgaaacgtatccgcgtgccaactcgtcgtgaactggcgtcttacggtattaagctgccctcacagcgtgcggcggaagaaaaagcccgtgaagcccagcgcaatcagtacgattctggcgatcagtacaacgatgatgaaatcgatgcgatgcagcaggatgaactggcacgtcagttcgcccagacacagcagcaacgctatggcgaacagtatcaacatgatgtgcccgtaaacgcagaagatgcagatgctgcggcagaggctgaactggctcgtcagtttgcgcaaactcaacaacaacgttattccggcgaacaaccggctggggcgaatccgttctcgctggatgattttgaattttcgccaatgaaagcgttgctggatgatggtccacacgaaccgttgtttacgccaattgttgaacctgtacagcagccgcaacaaccggttgcaccgcagcagcaatatcagcagccgcaacaaccagttccgccgcagccgcagtatcagcagccacaacagccggttgcgccgcagccacaatatcagcagccgcaacaaccggttgcgccacagcagcaatatcagcagccgcaacaaccggttgcgccgcagcagcagtatcagcagccacaacagccagttgcgccacaaccgcaggataccctgcttcatccgctgttgatgcgtaatggcgacagccgtccgttgcataaaccgacgacgccgctgccttctctggatttgctgacaccgccgccgagcgaagtggagccggtagatacctttgcgcttgaacaaatggctcgcctggtggaagcgcgtctggctgatttccgtattaaagccgatgtcgtcaattactctccggggccggttatcactcgctttgaattgaacctggcaccgggcgtaaaagcggcgcgcatttctaacttgtcacgggaccttgcccgttcactttcgacggtggcggtgcgtgtcgttgaagttattcctggcaaaccctatgtaggtctggagttaccgaataaaaaacgacaaaccgtttatctgcgcgaagttttggataacgccaaattccgcgataatccgtcgccattaaccgtggtgctgggtaaagatatcgccggtgagccggtggttgccgatctggcgaaaatgccgcacttgttggttgcggggactaccggttccggtaaatctgtcggtgtgaacgcgatgatcctgagcatgctttataaagcacagccagaagatgtgcgtttcatcatgatcgacccgaaaatgctggagctttcggtttatgaaggcattccgcatctgttaacggaagtcgttactgatatgaaagatgccgccaacgcgctgcgctggtgtgttaacgagatggagcgtcggtataaactgatgtctgcgctgggtgtgcgtaatctggcgggttataacgaaaaaattgctgaagccgatcgcatgatgcgtccgattccagacccgtactggaagccgggtgacagtatggatgcccagcatccggtgctgaaaaaagaaccatacattgtggtgttggttgacgaatttgccgacctgatgatgacggtaggtaaaaaagtggaagagctgatagcacgtctggcgcaaaaagcccgtgccgcgggtatccacctcgtactggcaactcagcgtccatcggttgatgttattactggtctgattaaagcgaatattccgacccgtatcgcctttaccgtatccagtaagattgactcacgtaccattcttgatcaggctggcgcggaatcactgctgggtatgggggatatgctctactctgggccgaactccacgttgccggtacgtgtccatggtgcttttgttcgcgatcaggaagttcatgccgtggtgcaggactggaaagcgcgtggtcgcccacagtatgttgatggcatcacctccgacagcgaaagcgaaggtggtgcgggtggtttcgatggcgctgaagaactggatccgttgttcgatcaggcggtgcagtttgtcactgaaaaacgcaaagcgtcaatttctggcgtacagcgtcagttccgcattggttataaccgtgcagcgcgtattatcgaacagatggaagcgcaggggattgtcagcgaacaggggcacaacggtaatcgtgaagtgctggccccaccgccgtttgactaattaatgcattgccggataaggcgcggtagcgtcgcatccggcactctatcaactgaaaattcagtattttcttctttcctcaagctgattattagcctggaatagagagtagagggaactcccgatcgggagtgacgtaatttgaggaataatgatgaaaaaaattgccatcacctgtgcattactctcaagcttagtagcaagcagcgtttgggctgatgccgcaagcgatctgaaaagccgcctggataaagtcagcagcttccacgccagcttcacacaaaaagtgactgacggtagcggcgcggcggtgcaggaaggtcagggcgatctgtgggtgaaacgtccaaacttattcaactggcatatgacacaacctgatgaaagcattctggtttctgacggtaaaacactgtggttctataacccgttcgttgagcaagctacggcaacctggctgaaagatgccaccggtaatacgccgtttatgctgattgcccgcaaccagtccagcgactggcagcagtacaatatcaaacagaatggcgatgactttgtcctgacgccgaaagccagcaatggcaatctgaagcagttcaccattaacgtgggacgtgatggcacaatccatcagtttagcgcggtggagcaggacgatcagcgcagcagttatcaactgaaatcccagcaaaatggggctgtggatgcagcgaaatttaccttcaccccgccgcaaggcgtcacggtagatgatcaacgtaagtagaggcacctgagtgagcaatctgtcgctcgatttttcggataatacttttcaacctctggccgcgcgtatgcggccagaaaatttagcacagtatatcggccagcaacatttgctggctgcggggaagccgttgccgcgcgctatcgaagccgggcatttacattctatgatcctctgggggccgccgggtaccggcaaaacaactctcgctgaagtgattgcccgctatgcgaacgctgatgtggaacgtatttctgccgtcacctctggcgtgaaagagattcgcgaggcgatcgagcgcgcccggcaaaaccgcaatgcaggtcgccgcactattctttttgttgacgaagttcaccgtttcaacaaaagccagcaggatgcatttctgccacatattgaagacggcaccatcacttttattggcgcaaccactgaaaacccgtcgtttgagcttaattcggcactgctttcccgtgcccgtgtctatctgttgaaatccctgagtacagaggatattgagcaagtactaactcaggcgatggaagacaaaacccgtggctatggtggtcaggatattgttctgccagatgaaacacgacgcgccattgctgaactggtgaatggcgacgcgcgccgggcgttaaatacgctggaaatgatggcggatatggccgaagtcgatgatagcggtaagcgggtcctgaagcctgaattactgaccgaaatcgccggtgaacgtagcgcccgctttgataacaaaggcgatcgcttttacgatctgatttccgcactgcataagtcggtacgtggtagcgcacccgatgcggcgctgtactggtatgcgcgaattattaccgctggtggcgatccgttatatgtcgcgcgtcgctgtctggcgattgcgtctgaagacgtcggtaatgccgatccacgggcgatgcaggtggcaattgcggcctgggattgctttactcgcgttggcccggcggaaggtgaacgcgccattgctcaggcgattgtttacctggcctgcgcgccaaaaagcaacgctgtctacactgcgtttaaagccgcgctggccgatgctcgcgaacgcccggattatgacgtgccggttcatttgcgtaatgcgccgacgaaattaatgaaggaaatgggctacgggcaggaatatcgttacgctcatgatgaagcaaacgcttatgctgccggtgaggtttacttcccgccggaaatagcacaaacacgctattatttcccgacaaacaggggccttgaaggcaagattggcgaaaagctcgcctggctggctgaacaggatcaaaatagccccataaaacgctaccgttaatgttatcgttgcggtaatgttgttactgtatccctgtggtcgcaggctgtggccacatctcccatttaattcgataagcacaggataagcatgctcgatcccaatctgctgcgtaatgagccagacgcagtcgctgaaaaactggcacgccggggctttaagctggatgtagataagctgggcgctcttgaagagcgtcgtaaagtattgcaggtcaaaacggaaaacctgcaagcggagcgtaactcccgatcgaaatccattggccaggcgaaagcgcgcggggaagatatcgagcctttacgtctggaagtgaacaaactgggcgaagagctggatgcagcaaaagccgagctggatgctttacaggctgaaattcgcgatatcgcgctaaccatccctaacttgcctgcagatgaagtgccggtaggtaaagacgaaaatgacaacgttgaagtcagccgctggggtaccccgcgtgagtttgactttgaagttcgtgaccacgtgacgctgggtgaaatgcactctggcctcgactttgcagctgcagttaagctgactggttcccgctttgtggtaatgaaagggcagattgctcgcatgcaccgcgcactgtcgcagtttatgctggatctgcataccgaacagcatggctacagtgagaactatgttccgtacctggttaaccaggacacgctgtacggtacgggtcaactgccgaaatttgctggcgatctgttccatactcgtccgctggaagaagaagcagacaccagtaactatgcgctgatcccaacggcagaagttccgctgactaacctggtgcgcggtgaaatcatcgatgaagatgatctgccaattaagatgaccgcccacaccccatgcttccgttctgaagccggttcatatggtcgtgacacccgtggtctgatccgtatgcaccagttcgacaaagttgaaatggtgcagatcgtgcgcccagaagactcaatggcggcgctggaagagatgactggtcatgcagaaaaagtcctgcagttgctgggcctgccgtaccgtaaaatcatcctttgcactggcgacatgggctttggcgcttgcaaaacttacgacctggaagtatggatcccggcacagaacacctaccgtgagatctcttcctgctccaacgtttgggatttccaggcacgtcgtatgcaggcacgttgccgcagcaagtcggacaagaaaacccgtctggttcataccctgaacggttctggtctggctgttggtcgtacgctggttgcagtaatggaaaactatcagcaggctgatggtcgtattgaagtaccagaagttctgcgtccgtatatgaacggactggaatatattggctaatacccaatttttctgaatctaaaaagcgcctgcgggcgctttaagaagaagtttaactatttgaaaataaatggattttatttttaagtgtccatataacgtccatctttgaatgcaaaaagcccacaaattctatgctgtgggctttgtttttggtgtcctcatgagtgagggaaccaaaaagaaaacccgcagtttttacgctgcgggtttctgggagaaaatcaggcaatttatgagttctggaattcttctgcccgtctttccagctcagccatgaaagaagttttggctttttcgtgagcatctggggccatgatgctgatgatttgtatattgtcataatccatccagtgccttgtataaaccagatagatatttgaagttctgtctatttgggctttgcttttcttccatggtggttctgacggtagtcttatgtgtaatttatatacaaacgaaccacataatcttgcgttatcttcccactgcccttcattgccgaatctgtcagggagaacaccggtatttaaccagttttccagagcctttccgtaaacttttgcaatgtcctggtattcaacatctttatgaatgcttactttgcttgccatcaggaaaactccggtgccgggagtcccatgtttttatgctcggcaataatcattgctttcacatttccgtcagacagcgtattgcctaggctggtcgttttgtctggtgcggtgcttcgtttgatggcgttgatggcatcacgagcgataaactctccctgcgcaattgcccgaccaaaacgaaccagtttattgcgataggcgattctttgctccatgctatccggatacatttttgccaggttatccggatccattacaattttgacagcctctttaacacggctgtgctgcttaagtgactcttcgcatatttttatgatttttgcggttttgtcagcaaacagagctcccttgcctctgttctgtcgttcttcaatgactgcattgagcgcggcacgcatgttgtcattcagcccgttgatatattcaatagcttcttcaagaggcagaaacacctgaccatcatgatgctcaaatgtaagcattgaaaccactctggcgtgtgtcacggattcaataactgttgttggtagtatcgtgcttttagctggcaccggagccagtgatgctgtcagagctgtagcaatagcagcaatggcagcagactttgatttttgtttcataatgcactccacaggttgatgtgttcagcatatcgcaaatagcagcttgtataaagcaacgccacatcagcagtgatcgttttacgcgcttttcttcttggatttgctggtcggtttttctgcgccagcttccgtcagtcgtgacatgctgaaacacttctgcacgctgttgttgcaattgttcgccgggctttacatcaggcaggttatgaccgatgggtaagatttgcctgataacaggcttatccgggcgtccttcaatgttggatatttccacgatggtgcctgctggcgggtaggcaaaacatcccgcctcactgccagctatggggcgggggagtggtactgccgggtaaatgggtgtatcgctttttttgttactccggcaattctgtctgttaattctgaggtaaaggcaaactcatctgattgtttcccctgtgtgaagctggcagatcatgccacgggataccttctgaagagtgaacgccggaggcgtgttttgatgtgaatttatggaaagcttccagtgttgagaagcatacgccgcattccagattgttacactggtaatacttttgccgcacggtgtttgaatcattttctggacgactggtgcggatacgggcagatgcgccacaaagcggacaacggaacatagcgacctcccttaacgtggtgctgccgctattctaagttgctcactctgtttccgctatccattccgggatttttgcctcaagctcaagctgcgtggtaaagccgctgttatcaatggtgtgctcggcttttgcaataatccagtcctgattatcaatctcgcttttaaatcctgttaccgtgccatgcatttcggggtagagttctgcgcgtccacgtgccagtgtgatggagaatgatgcggctccgcgttgtagctgctgccactttgccgccgcagcgcgtcttgctgcctgttcgttctgataagtcttgcgtaacacaaacacgttgccttccgcaccttccatatagtcgccttcacggctactgcttttctccattttcggtttacggcgtttcacgctgacttttttctttttcccgtaattaagatcaagccagtaagcgcgtacccccgtatacgcttcgcggtcagcaatgcggaactgatggcgatcgccactgctgcgcgtgatggcgaacgatggcaacggctggccctgtgcgttcacgccaccgcctggcataatgaataacagattaccgctttttaccgtggtgattgcgcccagcatttccgccatgcgcgtaagaaaggacatgtcgctttcttcggtctggtcggcgtggtcgatttcgatatccatcagcatttcgctgatttgcggtttcagaccgtaccgatgagcgatggcggataccacacgctcaacggtcacatcatgccaggacacctcacgtttaacgttaaattcatcccgaaaatctgcgcttctggctgaaacagtcagcctgtccggcggtccttcgtgagcgatttcatcaacaatgtaagtgcctttttctgtcagcggttctcctttccagccaatgagaaccgtcaggcgcgcgccccgtggcggtagctgcaactgaccatctgcatcatccagcgtgatggtgagctggtccgcctcaaatccccggttgtcggtcagtgacaggctcatcaggcgctctgccacgcctgacagcgttttaccctccgcgagaatatcaaaatccggcattttcacggggtctgtgccctgactgagcaattgcatggtggtgtcggtcatctgttccctccctgtgcggcatggtcgcatgtgcgtgcggagggggttactgctttttgttgtcgccgtggcgggagaacgtcgcaggggtgagattacgcgcgtggtgggtgatgattgttgccgaatcatttaacggatacaaggggctgaagctatgagtgaaactcgttttcatggcgcccgcgttacggaaagtaccgacctggtaacagcaattaacgacgttgattccagcgttatcggtatcgtggcaacggcggacgatgcggacgcgaagctgttcccgctgaacaagcctgcattagtgacccgcgtcaatgacgtgctgggaaaatgcgggacaacggggacgctgtaccgtgcgctgaaacccattgcagaccaggtgagcacaaaggtgatcgtcgttcgcgtggctgaacacaaagaagaagacggaaaaacacaggatcaactggttattggtggttctgaatccgacggcagctatacggggatgtatgcgctgcttgttgcagagcaggatgaaagcatcggataccgtccgcgtattctggccgcgccggggctggacacggaggcggtgacaaaatccctgtgcgtgattgcaggtaaactgcgcgcgtttgtgtatgcctcctgtcatggctgtaacacgatggctgaagccattgcataccgtgaaaaattcaacgaacgcgagctgatgctcctgtggccggacttcatcgcttacaacccgaaaagtggcgagaatgaggttttccccgcgccagcctatgcgtgcggccttcgtgcgtacattgaccatgagcagggctggcacaaatcgctgtccaacgttccggtcaaaaatgtgctggggatgtccaggcatgtgttctggtcgttgcaggctgctgacagcgatgccaacagcctcaacaacaaagaaatcacaaccatcattcgccgcaacgggttccgcttctggggcaaccgcacaccggaaacgaatgcctacatctttgaggtgtatacccgaaccgcacaggtgctggctgattcaattgcggaagcgcagtttgaaaccatcgacagtccactgacgcccgcgaacgtgaaggatgttatcagtgccatcagggcaaaactggattcgctggttactgccgggaaactgattggcgcatcgtgctggtatgacatcgtggataacagcaccacagaattacgacaggggcgcgtgcgtattcgctataaatatacgcccgttcctccgctggaagatatggagctttaccaggcgttcactgatgagttctttggtcctgcatttgcagtgcttggaggtgcttaatggccgtaccaaaacatcttcgtttttttacgctgtttgtggatggtgaaaatgaagtgggtaaggtgacgtctgtcaccccgcctaaactgacgcgtaaaaccgacagctatcgtggtggtggcatgctgggagcggtgagtatcgacctcggcctggacgattccgcgcttgatgcgagttttgtcatgggtggcgccgttcgtgcgctgttccttaaatatggcggaacaatggacggcacgctgctgcgttttgcgggtgaatactacaccgatgcagaaagcgacctgtatgaaatcgagatgcgcgggcgtgtgacggaaattgatatgggggaggccaaacagggcgaagccacgtcacacacttacgctgtcaaaaacacctactacaagctgagtattaacgatcgtccggtgtgggaaattgacctggtgaaccacatctaccggaaggatggcaaggacattgtacccgaccgcatccgctccgcgctcgggctcggctgataagtaatatgcaggcggcgcagtgcgtcgcctctgactgaaaggagttttctgatgaaagagacgaaaaataccgatactgaaaacgctgtggtggttgctgatactgcgaaagaaaccagcgagcgcggcgtaaaacttacccagccaattgagcgaggcgacgaaaaaatcacgtatgtggagatcaccggggctattgagcaggctggatccctgcgtggtctgtcgctgtctgatgtgctgagtctgaaagcggaatccatgtttacgctgttgtcacgcgtgacatcaccgcgactggatgaagtgacgatcaaaaaaatggcatcccgtgactttattcagttatgtgtggttgccgtaaattttttgagcggtgcggactctggcgggaagaacgaacaggcgacggaagcctgatcacggttgtgtgctttgagcacatagaagactttgtggcagatattgccgttatttttaactggtcgcccgccgaaatcttcatgatgacgcccggcgaagtggttagctggcgtgagcgggcggcacttcgcagtgggaatgcagacaatgaagactcttgacattcgggtcgccttcagtgctgttgacaggctgacccggccagccgaaaacgcccgccgcctgatggggcggcttggtgactccatccagcaaacgcagggggcaatcaaaaatctcgagcgtcaggcgcgttcatttgagcgcgcccgcgatgctgtcagtaaagcggatgctggcatcgtgaaagcacgacgccagcttaacgcccttcatcagttacaacgcacgggtactgtgctcagcgaaaaacaacaaaggctgatgcagcagttaagcacccggcttgaacgcctgaatgaatcgcgcacgcgggaaattcagaaaatgcgggagcttggcggagagcttaaacgccacggtatttccctgacaggcagcgataacaccatccagcaggccatcagacgcaccgaacagtacaacaaccagcttgaacgcgaacgacaggcgcttgcgcgtgtaacgcgggcgcgtgagcagtattcacgcgcgcaggaaacagcgggaaaactgaaaacgggtggtgcgctggcaactggtgcggcagcggctggcggctatgctgccgggcgttttttgcagcccgctatcggattcgggaaagagatgtcccgtgtgcaggcgctgacgcgaattgaccagaacagcccgcagtttaaggcgctgcgtgagcaggcgctaaagctcggctctgaaacgcagtttactgcgagtgatgccgccagtgggcaggcatttcttgctatggctggcttcacaccagaagccattcaggctgcgcttcccggcgtgctgagcatggcaacggctggcggtatggaccttggcgagacggcggatattggctcaaatatcctgacgcagttcggtctctctgctgaccagatggaccgggtcggcgacacacttactgcggcgtttacccgtactaacaccgaccttcgcgcgctgggcgaaaccatgaaatatgcaggtccggtggcgggtaagctgggaatatcgctggagcaggccgcagcgatggcgggcgtgctggcgaatatgggtatcagagggagtgatgccgggacggcaatgcgtgccagccttgctcgtctggcatcaccgccaaaggcggcagcagaggcgctgaaagagcttggtgtggctgtctctgatgcgaacggcaaaatgcgcccgatggaggatgtgctggccgacctttataaagccacccgcaaatacggggaagttgaccgggtatcgttctttaaggacatagccggagaagaggccttcacgtcatttatggccctcgttgatgcggcaggtgacggttctctgcccaagctgagaaaagaacttgaaggcgcacgcggtgaggctgaacgcacggcaaaggttatggccaataaccttgatggcgacctgagatcactcggcagtgcatgggaggggctgcgtatccgcattgcggatctgattgacggtccgctgcgctctgtcacgcagtggctcactcgggtggtctcaaaggtgacggagctggcgcaggcccatccggcactgacgcgccagctactgattgcaggcggtgcgctgctggcaatgactgcaacggttggctcgttgtcactggctcttggggtgcttgctggcccgctggcaaaactgcgtcttggtttttccctcctgaccggatcaatgaatgctgtcagggtcctgccagcgctgtggggaatggtggcgggttccgtctctttacttggaggcgctatcggggcgttgttcagcccggtcggtcttatcgtggctgcgcttgccggagctgccgctctcatctggaaatactgggacccaatcagggcattttttgccggggtgttcagcgggattatggagcggctggccccgttacgcgaaacctttgaacggtttggccctgttttcgaactagttcgtgatggcgtgattcaggtctttaactggtttacatcgctgctgtcaccgatggaatccagtaaggaaacgctggataaatgcaccagtgctggcgaggtgttcggcaacgttcttggcggtgcgttacagcttgtcctgacgcctgcaaaaatgctgctggatacgctggcatggatactggaaaaacttggcgtccttccagatgaagcggaaagggcgagaaagaaaatcgaagacgcgcagcgtgcggccattcttcaggacaaggttgctttgcttcagggggacctggcaaaaatcaatccgccgaaatctgcggaaacagggaccggaggcgataagcctaaagacaacaagccgctcacggacaacaacactggcacgctgcgcaggctcagcaaaattgcagataacacaggcaagctggttgatgagacgaaaaagcgtatcggccccggtgatattgtctttaagaacctgccccgtgcgcttgctgttcgcggggagtggcaggagcggaagattgcgcaggtcagtaagcctgcttccgcaatcaacatcacacccgtggtcccggctccgttatctccggtgttgccccctgttgttgcagcaagctcccgtccggtcgtggaggccgcacgtgcgccagttgcgcccgtttccgcatcttcccgcagccgggagactgcggcacccgaatttggtggtgaaattcatgtccatctgcataacgttgttacgcagaatccccgcgaactggcgaaactggtcggcgaaatggtcagggcagaactggagcggcgtacccgtgccgggcgtggtagcttttatgataaagagtaaggagtcgtgccatgatgatgatctacggcatgtttgtttttgagttgcgcacattaccgcatcagcagttacagcaaaacaaaagctggcgacatgtgaaaaacgagcgcgttaaccgttcagcaagctggcagtatatcggtgcaggtgatgatcgcatcgttctttccggcgtgctttatcctgagattacaggcggcgaagtgtcgctgtcgctgctggccacgcaggcgtatgcgggacgcccgtggcctctgattgatggcgtcgggcagatttacggcatgtatgttctgactgaaacgagcacgacccgctctgaactggatcgctacgggaaagcgaaaaagatagagttttccctgacccttgaacgctgtgatgaggatttgcgggagcgcctgcaatcctcatcgttcagtgatatgctgtccggtcttaaagataaggtgacatcatcccttaacaatgtggtcagctcagttaaaggggtgttctgatttaacgtaaaaaccgctaatgttcagattagcggttttttgtttcctgagtattctcaattattcctccgggttgcgtgtcacctacagggtgataacgataaatcgtcgatataccgatgtcgtaaattatggccagctgttttctgtcgtggccgtttttaatcagcctcgctatttgctcatgttgctcttttgtcagtttcgggcgacgcccaccaattcgcccctgtgcgcgggctgctgccagtccggccagtgtacgctctacaattaattcacgttccatttcagccagggcgcccatcacgtggaagaaaaatcgtcccattggggtactggtatcaattgaatccgtcagactacgaaaattgacaccttttttccgcaattcctcaatcagtgtgatcaggtgtttcatgcttctgcccagcctgtccagtttccagacaacgagcgtatcccccgctgataacgttctgagcagttttttcaatcccggtctggctgattttgttccgctgattttatcttcaaaaatcagttcacatcctgcgctattgagcgcattgcgttgcaaatccgtgttctggtcatttgttgatacgcgaatatagccaatttgcataaaaagcatcctgtttctgttagtaaaaatgctattagatagctctgttttcgaagttaaaaacgttggtttgggagaagcggcaaaacggaacgtgggaacaggggaaaatcagataccagatatgtctgcatttccatctggcaaaaactggtttcagttaccaagtggtcatattgtccaaatgttttcgatgaatgtttatggggcggacactaacggaactacaggtaatttccctattgcatttccttcaggcgcactggctgttagtgccttatggttagatggctcattaacggctgctccgacctttaaacttatggggtacacgacaacaaggacatctgtaaccttaaaagtatcaaccggaaatggtttgtatggaactatgattatcgcaataggaagataatatgaatcaatatatttattccccttcggaaaatgctttttatgctgttaatttaaaaaacacttatgaagtaaatggaacatggcctgctgatgcattagatattcctgatgacatttctgtaaaatatatggcggaaccgccacaagggaaaatccgagttgcaggggaaaatggttttcccacatgggctgaaatacctccaccatcacatgaggaacttattgaacaggccgaatcagagaggcaattattgattaaccaggccaacgattatatgaacagtaaacaatggcctggtaaagcggctattggtcgtctgaaaggcgaggaactggcgcaatataatctgtggctggattatctggacgcactggaactggtcgatacttccggtgcgccagatattaaatggcctacgcctccggcagttcaggccagatgacatccggcgcggtgctggtatctgttgccgtcaccgcgtcagtgtaatccagcacggcgttaagtcgggttgtttctgcctgcgtcagtttccgtccggcctgcaatttcagttgaatcagactgatggaagccatagcagcatcaatcagtgactggcgctgtgcttctgccgcttcgactacggcgctatgctgtgcctcagtatcggtcacccatttctcaccatcccatttatcgtatggagataaaggggcgatagtggttgtattttcagggtaatcacccggagctgtgatttcttttgattctcctgtttctgtgctatagacgatttcaccgcgatggtctggcacatattcccatgaatttaaattcacagaacgacagattgcataaccaaccttatgtatgccaggtgcatcaagacaggaacatgctggaataccgacccccacagcaagatattcagttgatgtggaaatatattcccgtgtttcactatcatagttatagacggtaatattccccgccttcgtggcaataaactcgctatttaatacagcattatccattatgcagccctcacgatatagttaaatgcaacatttcgtgggcgggtttcgttaccgccagggagctgaaaagcgttgataatcccaccgcttgcctgacttattccatccgtgtacaacccgccaccggcactgtcgctgagtgcaaatgtttttgatggtgaactgtttgaagctggtccccagtattttaatgcgagctttctgacttcatcactctgaatactcaataaagcacgccctgtatcaatgctgcgcccatcatcccagccacgaataaactcaccgcggagatcaggtagtttccctgatggatatgctgtagcaagacggggatatttaaccttatcaaaggcagcgccattgcatttcagccagcctgttggcggcgtagctgaaggccacgggaacaggggacaccaacaggtaatgcagagccttctcccaaaccaaggtatgcgagaagaccagccacatcctttccactcaaattagtaagcgtattgtccagcggttgtttgcctgccagtgcattaagcactgttgttgaaaagttagggtcattccccagcgccgccgccagttcattcagtgtatccagtgccgcaggggcagaacccaccattgccgcaattgctgatttcacaaaagccgtggtggcaatctgtgtattgttggccgactgtgccgctgtaggtgctgttggcgttccggtaagtgccgggctcgacagaggcgctttgagtgccagcgcattgttaatggtggtactgaatttcgggtcattgttaatggccgcggcaatttctttcagcgtgtccagcgtggctggcgcaccgttaatcagagcggtaatagcggcctgtataaacgcagtggtcgcaatccgtgtggtgttatttcctgcgggcggtgtcggcgcttttggctctccggtgagtgtcggattatgtttcggtgcatactgggtatggggatcctgtgcggcaatgtggtttctcatctggtcatccacatacagctttaattccaggactttatcatccacgtatttacgggttgcaagaaccacagatgggtcgattttcaacgtgatggcttcggtgttcgtgacaaccagaatcatgcggatagtctgggtgcgtccactgccttcctgcaactgcggtttgtacgtttccgggcagtttgccaccgcaatgagtacaccttcatcatcataaagaccaatctcacggatccagaatcctccctcgttttcagggatgatttgctccgcaataatctggctctgattgttagggtcaacactcagaagattcagcggtgcaatgcgtttctggttaatcagttttgtttgtgcagggtctggtgttggtaacacaccatttgcatcaccaacggccatttgcgtcagattcagcttactgccgagcatcgtcgcgttagccagtcgtgccgcgccctgattagtcagaatagcgtagtatttcactgtcatgcgtttactctcagattatcaattaaatgaatggccggggcagggaaataatccccttcgacaataatggactccggggtgtagggataaaccgtcagggcatcgccgtgatagcatcccgtaccaacgaaaatctttccgtgcacactcaggctgatcgccagccccgtcagatggcgacttactggttttgcatccgcaataaggcgctcaagttcctgatacatttcatcggtgatgccctgatcaagtactccgacaacaatgcgaaatgttcccggctcctcgttgagttgccaccactcctttacttctatcaggtagccgagaggctccacggctcttcgcagtgcgctgatggtccccttgtgtcggtgtatcagccacgcatcgcgaatcacctggcgctttgtttcctccggccagttgcggtcccagcggtcaacggaaaacgcccaggcgagataaggcagcagatgcaccggacaggtatccggcgaccacagcgtgttgaggtctaccggaatgtctgtaatgcgcgttccgacggcttcggcacaacgcatgaaactgctggctgatggcggtaacagtgaattactcattgcgcccaccttcgctgatggtaaatgactcacagcgcgccgcctgtatgtcgctgatggccagattctgggtgggttcgattatctccacacgttgcacgccgtgcacatggagtgcggcagcaatggcggacaacgccacgtcctgaccgataagcccctgttcagccagccacttcctgaatgacgattccgccgcggccagaataggttcggattccgggccggggtaaaagtacagttttgcattcagccgccatgtcacgattctggcgctctgtacggtcaggcggtcggccaccgggcgggcgtcctccgcgttcagagcagtgcgaacggtattgagcaatacctccgttgctgtgccgtcgccttcagtggacaggatggagaccgtcacgttggccggagacgggctgacagcccgcgcatcacgcaccagaccgctggcactgcgggcaaaatactcgtatgcacctgacgggccagcaacgctcagcccgtcatacgcccgctgcgcccgcagtctcagcgaggtgtcgctttccatcaccgcgtcggtggtatccgttgtcggagtgataaccaggcgctttgtgttcatattacccgcgaggttgtccaggtctgtcccggcgctgtggcttaacatgcaggcgcgtgcgccctcgttgacccgctggcgtaacagcatttcacgaaatgctgttgtctgggcgataacgttcaggggttccgattccagctccagcgcggcggagacggcggcgcgctgttcggccggataagccgcaatcatcatggcctttgtgtcagccagaattgcctcaaaatcaggctccgcgatgatggcgggttccggtaactgtgaaaggtcaacggcaggcatgatttactctctcagcgtgatggttaattcaacattctgcatggtctgaatgacagtacccgatagtgtcaccccggcgcggcctcccgccttccagacaacatcaatggcgttcagggcaatgcgtggctcccatcgtgtcagtgcaatcacagcagcgctcatgcattgcagacgcgtagtgttattcatgggttcgtcaatcaaatcagggacaagactgccatattcccgtcgcataacccggcttgccagcggagtggtcaggatgtccctgactgactgtttcaggtgctccatatcgttcaggtttcccgtcccgtccggattcattcctgtgtagcgggttgtcactgcggtcctcctgtcgaatcgctgccacctttaacgccaccgtgtttatgcgtatgcacagtgatgccgtttgaggtgaaattgccgccgctgtgcgtgatattgccgctcatcttccccccttttgtgacgtcaatctcggctgttttcagaaggtttgtgcactccacgacgggcgtgtccagtttcacgctgacggatgcctgcagggtggccgttttcatgccgctggcgctcagtgcgcctgcgtccgcgtcgtagcggaacaccgcgccatccggcgcgctgaccacgatttctttcaggctttttccgggggccggaatgtcatcgctccacaggctgccaattatcatggctgtttccgggttgccgccgatgcaggcaattgccacctgttcgcctggtgatggcggcagccacacgttgaaggctcccgcgcgcgtggtgttccagcgcaaccagcctgtttccagtccgccgctgaggacccgcacgcaccaggatttctcatcaacttcagagatgatcccggtgcggatgatattgctcagcagtctcataagttctgcgttcactgtactgcctccgcaatccggcccagcaccgtgttataaatcaggcgctcatccgcctgactgatacccagcagctcacgtaccgggtaatcggtgaaaatacccggcgcaacctgatcgcgttcaccgaactgatgaacgcgtgcaatacgtgcggccacgccgctgtatgaaccgccccgggtttcctggagagtgttttatctgtgaactcaggctgccagatcattgtttccgatggaagcataataagctttttctgcttctgccggaggagtatggcccagccttcccagcaatcgtcgattgttataccagtccacccacgttagtgtggccagttccacttctgcacggtttttccagctcttacggtgtattacctccgctttgtaaagaccattgatgctctcagccatcgcgttgtcatacgagtcgcctgtactccctgttgatgccagtaatccggcttcttttagtcgctccgtataggccagtgacacatactgagagcctttatcgctgtgatggatggtgccagacggacgacgggcccacaacgcctgctccagcgcatccagcacgaatgtcgtttccatagacgatgagacccgccaccccacgatgtatccggcaaacacatcaatgataaacgccacatagacgaagccctgccatgtgctgacgtaagtaaaatcagccacccacagctggtcaggtcgttctgccacgaactgacggtttacgcggtcgcctgcggcaacggctttccggctgatggtcgtacggacctttttaccccggagaacaccggcaagtcccataaccgccatgagacgtgccactgtacatctggccaccctgattccttcccgtaacaactgacgccagactttacgcacaccgtacacctgatgattttcatcgtatacgcgctgtatctctctcttcagccagtcgtcgtgctgcgcacgggcactgcgtttatccggatgatgtcgctgttgctgacaatggtaatacgttgacggggcaatatgcagttcgctgcataccggtccgaccccgtactgctcacgcagcttatccagcagtggcatcatttttttccagaggcggtcgaactccgccttcgcaaaataagcggaagcctggcgaaggatatcgttactgcggcgcagttcacgattttcacgttccagctctttcagacgctgacgttcagcgctggtgagcccaccatcaccgcccccggtatcccgctcatgctggcgaacccagacacgcagagtctccggcgtacagccaatctttggggcaatggaacaaattgccgcccactgtgagtcatattcatcctgactttccagaaccatacgaatcgcccgctgacggacttcgggggaaaaacgagtatttttagtcatcctgtttacctctttctcagggagtttagtcttccaggattttccggggcggttcagtaacctactgtcacaccggaggcatccgcgctggctttcaggtaacgggcggtgcgcagttttacgaacatggggacgtgctttgtgctgtcctggttgatacgccgggtgcgtatttccagaaaacggtcgatgtcatcccggtaaaacgtgcggatattgtttttatcctcatcccatccggtaatagttcgcccgtatttccctgtgtcgtgatgccagtttttcagcgtgcgtgtttcgttattccagataaagcgaatgcgctcctgtatccgggttacgcggcgtctgcgtggtgtccacgcggtcccgtccggcgctttctgtgaccggatacgcgcctgctgggcgcggcgtaaatcctgtgccagctttctggcgatgttattgatggcctgctgattcaggctgtcgcggatggcctcaaaggtttcatccacgcgtgtgaatgccttatccatcgctttcaccccacgtcacatcctggaatacatgcgaccagtcgccttcggaagagggcaggcggggttttggctccggcaggtgttctgcctgcggtgtgccctgactgctgcgcgtgacgcgaacgcgctcccgcaggggcagtgtaaacaggatgtcggcgctgtcatcgtcattaataacggcagaaaatttgatgtcctgattacgctcagggttgagcaacaactgcggctgattctccgacaaccacgccagcagcggcagcgtcaggtcgtccagctccccggcgtaatccatgacaaacatcaccatctgatagcggtaagcaaacgagggagtttctccggtcgtttcaatgttgccgctctccacgaaaatggtgaatttttccgggttggcctgacaccatcggcatgaacgggtcatggcttcacgcagggaatcagttttcagcatggttgttatcctcgttgttcagtcgttgcagcctgcgctgttccagtaattcaatggcccgtttatccgcgttacaggtttccagtgcatccagaaggcggtcgccccatataccgagatttccccatgtgggagtatcagggaaggggggaggcgttaccggtatggtcagcgtctgcggtataagccggactgacggcgctggcagtggcgcgttctgcgtgcctgcgcagcctgtcagtaaaacgagcgtcaggcaaagcgtgggcgcattcatcttttgcaatatcgttgcgtagctgttcacgtcttacctctccgtcctgattgcgttgctgattttccacgcggagttgcgccagcacctgctgcatatcctgtaccccggcgctgatgatattcagggtgtcggcggtacttttcagggtgctggcctgcgcttcgtttctggcgttctcccggcccagcgaccacgacagacgcatggatgttccccatccggcaatcagaaggaaagcgacgccaagcgtgggccagagcttcatgccggataggctccgtgtggtaactgaaaatgcggtccgtctttcagagtcttccagtcgccgccccattccaccggaatattcagttcccggctggcctgtctgaatgctgctgcgattttttcgtacagcggccattcccatgacacctggctgccgatataagccacaacatccacggcatgccccgtaaggtggcggctgttcatggtctggctcttacccgtggccaccagttgcttctggcggtaacggctgcgcaacccttcggtgataccaaaatccacttccgagatttccagtgcccgtcgggtcactttcaccagatcaggatttacgccctgcaaattcttttcgctccggctgctgaatttaaatgtgttgctcattcgtccttctccttcaccctgcgattaaaggccgcaataaccttgtcgcgtgctttctctgcacccataaacccgattgatgcgccgataaacgtcacggcatcttcaggaaacccgaagaagcgcaacgacccggccacggccatggcaagaacgccgcacgccagcgatcccgttacggtctgaaccagtgttcgtccgtcataaagactcatcagcgcggaaatgctgaccgccgcgcctactgcatacaccgttggcaggtggtcaaagagccacgcaataacctgctctgtgatccctgtttgaatggtgctcactgctactccccccacaactgaatcatttctcgtttcttcttctccggctccggcatctcaacttcctgcccggcgtccagaaatacctgctgacagagtccggggttggcatccagcaccttttcggtgacgccctgcgtcgtgccgtagtaccggaaacagagcgaatccacggtgtcgccttccagtgccttcactttcatcagcacaactccgcaaagattcgcgggcggcacagaatgtcagagatggcccagctcacatcacgccacaaatccgatgtctgtatatccagagcgtccgcccggcggtcgcccttgtccgttgtgtccgcatcacggtaacgctccagaatcagggcgcgcgttgcggtataaacagcattgcgccagtgccagagattgacgctttctccgttaattacgggtgccggaacatcggccagcgtctgatggccagctgcctgctgttcctgctgccatgcttccagctcgcgggtaacgtgtgccacagccccggtggcagtatgcagcaggcgggaggtggtcacgcggcccggcagtcgtaccgccagacgcagctcgcgcagcacaatatccggccagaatgcacccgctgaaatgcgggtatcgccatcatcggtatcggtgatgtcgtcctctgcgggtctgggttcagttctggcaaccatactcatggggttcactcctgaaaaaaatcgggcggtgggtgcgcggtgtaaacggtcacggagtcaaaccggaacaccgcgcacgccgcccgctgacggggtcagtcgttaaccgcgcttcgccttctgcgtcgcggtggtttttcgtgttgcaggcttccgcgttgtctttttacttttgctgctttcgtcctgcgcctgctgtgcgctggcgtcttctggttcggctgcggaatcggcttttttcagggcgcgggaaagggttgcaatctcgcgtttcacacctgcgttcgggttcaggtgcatcgcttcgcgcagcagcttcagtgataaggccatgttgtctgcatcggtcagaccacgatgggcaaaggcgcacgccttgcataatttggcgcgcacttcgtccggcatgtcctggtcggtgacaatctcccggagggtatccagtggttcgataaaggcggacaaatccgcgtcggcatccgtcccggcctgcgtcagtaccgggttgcagatttcttcggtcagtaccgtggcagcagtacggccaaagttatccggcatgatgaggttgtgacggaccacatatgcaccaatacgcagcgccagcggaagatcgccgcagtcaatcgcccacaccatcagcgtggcaatcacttcatcctgctgcccgccgtcagcctccagcgttccctcaatccagccggaaaagtccggcaacaactcttttttgatggcggctttcgcgcttctggcctgtacgcccttaagccgggcctgtgccagacgcagacgatacagcacctcttcatgcgcggtacgcgcggcgtggtccacgccttctttcgcccggcctgcgcgctgtgccatcacgttctgccagtgttgctgtgcaggagtaatcattttttctctccgttacaggcgggcatgatgcccgccgtgagttgattagctgtcggcgaacttcaggccagtgaccatcgcgcacttgccatagtcttcaacgacataagcgtcattgatggactggtaggtggcgatgcggttgtattccggctcgtctttcatcaggcgacgcattgttcctttctgccagtaaatcgacaggttgttgaacgaggtgatcagcatcgttgaatccgggaagaacggcgcaaggaatacatccagtccgccaatggcgcgcgatgacaggatgagctgtccggcaagtaattccgcattgggattctggccgctgatgctgttcagcacgggcagacgcagcgagttaaacaggttgcgccccatgatcaccacgaggtcgtcagcttccttgtgccattcatccagcagggatgagcgcgcgtcctgtaccagtgcatcagcgttcgcatacttacccgcgtgcgccacggtgttgtccatgttgcgggaggtcagcgtcacgtcattcattacgcgctcgctggcgtcggttctgatgtgctccagccatcccacgttaacgtcctgaagcagcttgttggtgctgaagttggactcatctgcgtgagacgtgccgttgaaaccgatcatgatgcggtcaagcgccacctgccgggcaatctgtgtgctgacgcgtgactgaaaatcagggtgtgccgcccaggcatcaagctgcggatacgaaataaacgtgtcgtagttcacctgttcgcactgatatttgcggtttttcagatcaaccacgttattcgggttacggcgttttgtgccgtcataactggtattcgtgcgcgcaatcggcccggtggtgtccaggaggattttttcgcctttctggtcggtcacaccgaacacgttaattttttttgtaaattcagtgctctcctttactgcgttttcaaaacgctgctgcaccgagggttccacggtaaatcgcgataccagtgcagataccgggatgttgttaagcgacgcctgctgcgccatatagcaacccagcttgttgcgggtaatatctgacatcaccagattcataaaaaatttgctcctttgtcttatcagaagtcagccagctggtcggaggctgcgcccgttgcggtgaagcggttctgcggatcgccgtcctgcgtgcgcagtttttccttcagtgctgccagctctgtggtcagtgacgtgattttctggcggtcctgctgatggcgggtttccagcacattaaaacggtcgataatgtcggcctgtgacgttgcgacgccttccaccgcttcctgaatacgggagaaactggcgtcatccgctttgcggccacgaccaataatccccattacgcggttaaaccactgggtgccttcttcctggcgttgttctgccatttcgacgatttcagactcgatggcttcggaaatgagcggtgcctcaccctggatactgttgaacgtcatcaccgcctgacgctgctgtgccgtgaatttcaggcgctcagtgcccaggcttgccggggtgtcggtcatcgccagcccgaccagataggcgcgcccgttaacggagaactgcgggtgcagttcgatactggaatagattttcttgccgtcagcgacaagctgcttcatgcgctcggtcggttcgatttctgcatacaacgcagtacgtccggccagcgggccttccgtaatatcttccgtactcagtgcggtgacatcgcccattgcggaaaattcgcttgacgggcatggcgagagatagtgctcaacgttcacgcgggcagcgtaaacatccgggttgaagttctcggcggcttcacgcagatgtaccgggctgatttcacggccatcaacagttgatccggagacagccacgcgaaactttttgcgggatgtctttttttcattagccatagtttttgcccctctgactggttcttcagtcatgatggcaaagcgtaacaggctgatacaaagggcttttgttgtaagaaaacagccagaacagggggttaaggagaacggtttcgcgcgcgggtaatcttcctgtaattactcagggggagcaatgattcaggacgcttttgtgcgccagcgtgcgcggcaactttactggcagggttatccgcccgcagaaatatcacgtctgatgggaataaacccgaacacgatttatgcgtggaaaaaacgcgaccagtgggatgaaacgccacctgtgcagcgtgtcacgcagtccatcgatgcgcgcctcatccagcttactgaaaaacagaataaaacaggcggtgactttaaggaaatagacctgctgacccggcagcttaaaaagctgcatgatggccagccggatgtgatggccgcaggaaagaaaggccgggcgaaaaaactcaaaaatcatttcacgccggaacagattgccgcactgcgggaaaaaatcatcagcaggctggagtggcatcagcggggctggtttgactccctgaccctttgcagggaagcagggatacgtaacaggatgatcctgaaatcccgacagattggggcgacctggtattttgcacaggaagctctgctgatggcgctgcgtgacgatgtggcgcaaccttaccagcgtaaccagatttttttgtctgcgtcgcgtcgtcaggcgttccagtttaaaagcattattcagaaggccgcggctgaagttgatgtggagctgaaagggggcgataaaatcatcctctccaacggcgcagagctgcattttctcggcacttctgctgcgtcggcacagtcctatacgggcaatttttattttgatgaattcttctgggtctgtcgctttgctgaactgcgcaaggtggctggcgctatggcaaccctcagcggactgcggcgcacctacttctccacgccatccaccgaaacgcacgaggcatacgcctactggaacggcgaccgctggaacgagaaaaaggccacgcataaacgccagcgtttttctgtggactggaaaacgctgcataacgggcttatctgccctgaccggacgtggcggcaaattgtcacgctggaagatgtggttaatcacggctggaaacacaccgatattgatgaaattcgtgatgaaaacaccgaagacgagttcctcaatctttatatgtgtgagtttgtccgcgaaggggaatcggcatttaacctgaatatcctgattggctgtggtgttgacggatacgacgactggaaagactggaaaccttttgctccccgcccgatggggaatcgtccggtatggattgggtatgacgcaaacggcagcagtggcaacggcgacagcggcgctgtgtccgtggtggttcctccggctgttcctggtggccgttttcgaacggtggagacgcgacgcgttcaggggctggagattgaagaacaggccagagtcattgaagagttcacgtgtcgctacaacgtggaacacatcggcattgatgtgacaggcgggaacggggaggctgtttatcagatagtgaaacggtttttccctgctgctattccgtacaccttcacgctgtcatcaaaacggtcgctggtactgaaaatgctgcaaataatgcgcgccgggcggtgggaatacgatcgcgccgaacgcgagctggtcgcagcctttaacgccgtgcgtaaggtgaaaacaccgggcggctttatcacttacgaaacggaccgcgcgagggggatcagccacggcgaccttgcgtgggcaaccatgcttgctgtcattaacgaaccgattggcggcgaaggagaaaacgagcgtttcacggttatggagttctgatgagcagaaaaaataaaaaagtgcgcatgagttcacgcattgatctcgctgatgcgctcaggaaagaatcgtcgctcagtgcattcacatttgatgggccttatcgcctgatcgggcatgacctgctggataatatgtactgtgctgataacgggcggtggtatgaaaccccggtggactggtacggcctggcaagagctgcccggcaaacgtcctggcatcagtctgcgctttactttaagcgcaatgtattactcggttgctacatcccgcacccgctgctttcccggcaggatttctcggcgctggcgctggactggtttgtgttcggtaacgcattccttgagcttcgaagcaatatgctcggcgaaccgcttaaattacggcacgccctggcgaaatacatgcgacgcggaagcgatcttgaatcatggtggtatgtgcaggatggcaaggacgcgttccagtttcgccctggcaaagtgtgccacctgatgaatccggatattaaccaggaaatctacggcatgccggaatatcttggcgcattactctcggccagcctttctcattcggcggacatgttcagaaaactgtactacgacaacggatcccacgccgggtgcatcatctacatcggtgcagcgcaggtaaaccgcgaaagcatggactccctgaaagaaacgctacagggggcacgtggtggtggtgcgtttaaaaacgtgctcattcatgcgcccaacgggggcaaagagggggtgcaaattttgccgttccagcagatcaccgcaaaagatgagttcatgaatgttaaggcggcatcccgtgatgatgtgctggctgcgcaccgcgttccgccgcaactgatgggggcgatgccgggcgaaaaaagtgcgtttggtgatgtggagaaggccgcgcgggtttacgcaattaacgagctgatgcccgtcatggaggccatgaagcacatcaatgactggcttggcgaagaggtgatccgctttaacccttacgcactgttagacacccagcccacatcctgacgcgcttcgcttgtctgctgcttcgccggggcataaaaaatttatgccccgactctccagctcctgtatcaatcagataatttcacgacgccttccagcttattgccatcatcgacggtcaggctcttacgcaatcccatcgcgctgactgcatgttctcgccgcctcagtgcgattttgacggccttatctgtcaccccatcaaatcaaaagccctcacgtctttttcacgctcagcgtgagaaatacagccattctgttgtgtcgctgcgacatcgttcaggggatgctatttaccccctgaaacgcgggctgttcccccgtcacctgcgcgcagaaaaaacgcgtttttttgtgcatgcacggatccttgacggatccagccgccacgcgggccggaagggtaaaaagttgttcaaaaaaattgtgcaaatttgtgcgcttttgtgcaaagaaatgcccctcaaattgaggggcattatgtcttgaaggattacgaacgaataggaattgatgtttgcggttgaattggcacgagcacctgattataagtacgtaaaatttcgttatacaggtcttggtgctttgatgccttaatggtaattataagagcatacttgattttttctgccttatggctggctatgcttgcaccggcctcacgagcgttataatgaatgtcaaatacaggattttttagagttgaacctagcatgttcttcgaattatgtaagacggtctcccatttgcccatgtcagaacgtcgctcactttcagttgaatatttggccagttcaaagaatcccttggtttcagcattttgttttccgtctttgatttttgaatcatttggccggaatgtcacttccaaaccagcttttgtataggaagctgggtcttgtggatcagtggttgttgcataacagaaagttgccgctaagtttattctacctttcaagccaccttcaggtattggaagaggagcgcgtaagtattttcctggtttcaattcaccttggtagacgatacgggcaacaccatcagggctgactataatgtcgttcaagtcttcaggaagttttccccagccaacttctgtacaaggatgatcaagctgttttgacgcatgaattaacaaagctttgattgctagtaggctcaaatcgttccctaaaattgcccgaacaccaacagctgctcgtaaggcgtaaggagaggcaaagcttgttcctagctggggtatgattacaggcttcttacctttacctaaaacatgaaagtactcgtctgtgtcaccaccaaacgcaactaaatccggtttcatcacgccaggacttctgcctggcccaatggcgctatatggtgctcgtttccattccgtatcattaactgtatcacaagcaccaacagcaagagcattaacgcaatcggctggtacttgaattcttgcattaccagacttgcgatccatttctccattgttgccaacagcaacagtcattaatgtttcaccatcacttaacaaatcatcaataacggaagtccatgcatgaacttccgtatcttcaattggtaggtctggacctaaacttagattgataaactgatactggcgagacaacaatacctcttcaataaagcccaaagttcgatatagttccagcggatcttcttggcaggtcttgttgtccaaaactcttaagttatcaatataagagtatggtcttttcgcttccgatttattacttattggtccaaataaaaaggctgaagacacagctaaaccatgctctaaaccgtctggatcatcctctgcatgatcgtccaaaactctataggattttaaccatggcgatatagcgtgctctgatggtaaaccaccatcaagaatcgcaacttttatttctgaagatacggggccctcagcaggcaatttacactgagctaaaggaccgtagttcctttgtattggtctaatcccacgcaatcttggaaccggtcttattactcgtacaaatgtaaatttcgcaagcttactaatagtaattctatcggcctggattggcacgaaccataatgtaccagcggtaaaagctaatgaagtatgtactttgatgttcaaatttgatgcaaactgaacaaattgttgctgaaccaagtcttgttcattatctggcagtaaatgaacaccaacctcaaaatacgaagaatcctgctcaccaatggtaataatacgctcttcgggtaaataggcatcgaaccgttctatgcgtgcaaaatcaatcgcttcgtcagaaaactctttgagtcctgacacccaatgaggtaactctttgaaggattctcttttaccagcaacaaacatttgtgtcgtagttacttctgacacagtaacttttcgcttccagctttgaggcgtaatttttaccgtcctgctgccaatagacgttaacccggtagacttaagcatttttgcaggaaaaaaagagcgtgcaatatagctcggattcaacgtcaacttagccacagcataatcataaggacatgcctgactgggtaaatcatcaaaattttctatagtagatgcaatttgcggcaataaacgttgtttcgattcgtaaagagaataaacctcagcttttccgggcactcttttaggaccaggaatatcgctggttaataattcgccgcgtccaatcagaaaattagttttcgccatacatactccttatctatgctgtattacattttttgactgtattttctaattgtatccctactgactccggttaagtctgatatggcatgctgggataatttagaatttctttttagagtaactgcaatttctttacgttcattcctgtctaattctgataaaccatctttaatgaacgacccaatcaactcttcatctgaggaaatacctaaagcgaccgaacgtcggaatttgttgatagaacgctcaatattactaaaagattcatttttgaacataatagccagtagatctatccaacgtgcaaaaatcgcgtagtcgggacctgaaaagcgtttaattgcttctttaatactttcgctatctggcttctcaaaattgagcactaaatcaaaacgtctccatagtgctggatcaatcaactcagcgaagttagttgcagcaagtagcaaactagaagacggccattcgtcaacctcctggagtattacggtaacaagtctttttaattctccaacatcagaatcatcacttctctttttggcgattgaatcaatttcatctaacagaagaacgcacggccctttcttcgcaaaatctagagctgcccgaaggttatttccgcttttgcccagatagctgctcattactgccgttaaatcaagaacgtaaaaaggaacccctaatttctgagctaaccagcttgccgtaagtgttttacctacacccggagggccaacaaaaatggcagagcgtgttggttgtaagccgagagtcttgaggcgatcgatgtgcttccgctcaagaataatttgatccagtgagtcttctatctgactggacagtagaggtttgctcacaatcttttcatttggtgctttaagcaaggtaagccttgactcctcgtccacaggcatggtttgaggcagcgcttgttttggtgcggtaaccttacgcaggctttgtgcaggcttttgcggtttatttcgtagataaagatcaagctgctcggatagagcaggcatagtttcccgatatttacgcaccaagcgagcgacatataaccgaacgtcatcatactgttcagttattaccagtctaactagttgggctaaatctgactgaataccacctaagtcgcccatcttaactgtaacctcttgattttaagtgaattgaaaaaacatttaactggactatttatagtattgcacttttttatcaaacagggaagaggaatactatatgaaattacagtgtgcctcatggaacgtccttaccatgtctaaactctaccttcatacaattgatgatttctttcttggttattttttcttctcgctattgcctttgccctgcaacagacccgccttgtgacgtgcgcgttcagtggtttcattgattctctgtgcgtgctctgcgtcacggatggcgcgcagcatgtcagaaagcacggtaacgggagttttcatggtgttctggtcctgctgaattgtggatgccaggcgtgcggcggcttctgggtctgatgccccgagctgtttcagatagctggaaaccgggttatggcggatttccgtgctgtttacgctgtgattacgactcaggcgctgccagagttgcgtgattcggctgtccggtcgggtatccggtttacatacaatttcatatccctgcggcgcaatgatgctgccgtcaacgtacagactgccgccccgtaacaggtgcagcatctgttgttcaccgatatgcaggccgagagattcggcagactcccgccattctttagcgagtaactcgtggttatcaggcaaaggccgcggctgtttgcggctctgtgtccagttctgcatttcatcactgttgttttttgcctgtttgtcacgcagcgaacgcatcagcgcccggcgttcgtgccgtttcagtgagcgcatccattcatccacatcaacgccgtcaggaagctgcggccacggtgctggccgttcttccgactgttctgtcccgctgttgcctgtttcctgtacacggggacagttattgccacgagtccaaggggcggcagggccgccctgaaggtcaaaaccattttcgtgggcgttgtcttctggttctggtttacgtcttaccaatttccagttatccggatgcgtgcacacacgggaggattccccgatgagtggtgaccagatcccgtaaatctgtacgctctgttcgccgtaatcgttcagctcatctgcgaggtcgtaggcggtgcgaatcaggtagtccttgcgtggaacaagcacgccaccctgtttttcaatgtaggtggcaaaacacccggcatcggcggcagcgagtaccgcatccattgcatcatctttcagccgttgcgggccttccggattgcgtgccatctggctggcaaggcggcgcagttcacgccacacctgacgggaggggatgccaaagaactggaactgacggacccggtgaaggcgcgcccagccgatggcgcgctccacgctctcggccattgattttccggtttcgtggtcaacgcgtggcttgcccgttttcgggtcgatgccatccacggcgcggctgtccaggttctttccgatgtaggtggcgatgtagctggttggtgtgccttttgagccgtcgacatactccgccttaaaacgcggagttatgtcatcgcccagctcgtggcggtcctcctgaatggcaatatcgcagacgtgggacacgatggtttcaatctcgtccggatgtgcaaagaccatcatatgccagtgcacagtgccgtcatggtgaggctccaccgtgcggatgccataccagcgcaggccgtcgcggttcagttttttgcggaccgccgcaaaaaacgtgttaaccaggtaatcgctggagtcgcgcatggtggccccgttccatttggggttcggatgaccgttctccgttgttgcgtggtattttgacgggcaggtgacggtcagaaacaccgctctgtcgccacgggcttcggccagaagttccagtcccttcatggtggccatcatttctgccttacggtgaaccgggttacttactcccgcgtaatacaccgtctcgagatcaatcgtgaacccgtcttcattttccagcatgaaacttttcaggaaatcgcgtgttttctcgcgctgtgcgcgaaactcgcttaacgcgtcctggctcagatagggcgatgtttttctggaaaccagacaggcggcgcggagttgttcttcccgccactcgcaacgtaacagccacagtttgcgtttccaccattccgcacaggtcaggcgaaggattgcgcccggcagcagctccgtgtctggttcgttcctccggtctttgtctgttgtcagtgcgtcataatgtggaggcatggcgtgcaggtgtaacgccatgcgggccagcatctgatacgccttcagcgttacatccatggtcagctcgccatcggtcgcgccaaagccatcgcagagtttttcgaaggtgctgctgaacatcgccgccgtcatggtggccagcgtctgtatctggtgtttgttgagctgcggcaggtaaagcaaatcgtccaggcgttcgcgtccggcaagggagcgataacccggtgtcagccagcggtgatcggtgcggtccagacgttcgaatattttgcgcagggttccgcgtgcatagcgttccgcctgccagctctttttgcctttccggcgatcggcttcctgttttttgcgcaggaaggagaggtggcgaataagcggatcgcgcagataggacggcagcaggcgcagcgaggccatggcttcatccactgcgccgcgtgcctgttttctggcgtctcctgccagtgtgatggttttgtcctgtttttcctgtgcgtccaggcttttattaatcaggttgcccagcggcgtggcggagaacgccgcatcagccatttccttgcggcgctcgttctctgcccggtaggcatccagccaggaggaaagcgcggattcaggagcggggatccccgttccttcacgccccactgcgtggcgcggttgttgccagtccctgatgtgctctgccgtcatagtgatttacttcgtcatgccattcagggtgtcgcggcagacggtagccagccgctgaatttccagcacggtgtcttctgtgtcggcatagtgatgtgtgatgcggatgctgtcggcaatcacatcaacgatcgcagaggatgggcgctggtaaatgccaataacggacggggtgccaccttcaatacggtaaagcctgtaatttccctcgtggctgtcaatcatgtaacgaccatcaataataatctttccgtcagcgagctgcggtacaggcagggatttcaggtacatgtcataacgttcacgcacgcgaacggcaagatcacgctctgtgttgagcaggtattcaagaaagtcgttggcgagaatcattgcggcaatcctcttgttacagatgtgcgaaggcctcccgccgcaaggtgcaggaaaggcccggaacaggaattaatggagtttgttttgctgctggatgagctgctgaagctcgcgcagatcatccgccagatagctgaaaacagaggcggaataaatgtttgagagtgcgtggctgcgctcatgcagcatattgatgtgcatgatttgcgcgacgcgtgatgcgcggaaaagtctgcggttgatttcagtctggatgtgacgacgctccgcgatagcgcggtgtggtttgcggtttgccatggtgtggccccttgtgtagtaagttgtgaaaactcaccatccagagctgcgaaactgtgggtggcgagacgtacgaggttcgcagtaccggctacacaagaacccggcccgaccgaagtcggccccgtacgccccgccataattctgacgcgaaaaaaacgtggcaatacagtacgcacaaaaaaaccgctggcgcggttgtgcgcttgtgtagtcagcaggctgcgaaacccggcacccgttttgtgaggtgcagcagaaatgtaacctgactgattgcggcatggcaagcggtttttttgtgtgtgcatgttctggtttcttactggttcagaaaaaaatcaaaaaccttgtcaatgcgttgcagcagctcttgctgtattgcttccggcgtttccggttcgcctggcgcctccaacgtcgcgcagaaatcctcgatttcatgacggagcgtcaggcgaatggcgagatgtgtggttctggcgtgctccagctcatccagcagcgccagcacagcagacggcgagagcattgcgcgaaacgccagtaatttttgaggcgttgccattcgttgcaggtcagtcgccagttcgcgtaattcctggtggttgatggcgctcatgctctggcttccttcagtagctggttaaacatgttggtaagtggattgccgcacccgaacggcatcgggtttatctggtaagaaaagcgaccgcctgttttgcgctcttttcttatgactgaaccgctgcgccagagtcggcgtaactccgcattaatggctgtggttggggtattcagtgctgcggcgatctctccgccgctacaccccggatgagtagcgatgtagtccagaatggtcatctgcgtggctcctgtacttgtcggataagattcacccgcgccacgttggtggcgcagaaataagtgccgtcagtgaggtagatgtggtgcgcatccttttctgaacgatgtttgtcgatagtggtaatcaggcgttcgtcgacctcgtattcgcgccctctggaggtaaagcgaacgacggaaaaaatgcttaattgccattgcgccccctttgtccagtaaccctatgcgttaaatacggcacgttgcgcgtcatcaatgaatacagcttgagagcgttctatcaggcggagatttgtcagaagctcagactcttttgtgtggtaaggcgttatcaggtatttgccgtgcagttcggcaataatggtgtattgcggcatcattgctgaaccaagaatataaatgcagcgtccaatgctggacggattcatggctgcaactgttgactgtgttttaagagtgtcgatttctttgctctgttcctcaataattttggctgcgtcagcggtgatttttgcaatggtcagtgcgtgaagtgctgccatatgttggctacgcttcacggcatctttagccatttcatcttccgcttctgatattttttttaatgtgttgataatgccttcttcttttgtgttcattttatatctccgttatttacgtgtgcgaatacctccgcgaatgcggattgtttttacattttcttatttaacctgtggttttatttgctctgttattcgccagtgaaaaagcgttcaatcttttttactgaatgaataattcgcataatcccaatggcgcaggccacagaaataatcagaacaagccatgagataaatatactcatgcgatattccccagcttatacggttcaatatgttccccgcattctgcggcacagattagctcggaaagttcgttaagtgcatccagatcatcagcgtaaaaagccacgtcatacagactccggattgccctggtcaatgagtcacgggctgcacgttcagcatgagagcctgatgcacttaagcgaaaataaaaacgctcaagtgctttgttgatgagtgttttatattctttgcccattgcaacaccctttaatctgctttctgaatttcagcttctgaatccatacaaataatttcgatatagggttcatcgccattaacctgacgtgccttttcagcttcgctaatgatttcgcgtacggtctggtacggaagttccacaaacaatcgcgtgccgttcagataaaggtaagtggccacatctttttctgccgggactacagcatcaatagctgatgcgcgtaacaacaactcaccgcgaaaatcaataaagcggataaatacaccttgtgcatggtctttagtcataaagcacctgttataaatcagcttgtttaataaaactttgcccacgaagcagacgatcaactgtgcgaagtgcttcgtataatgtgaaatcctgcccgaactgattgtcgccgcagttcaatgcaaaaatgcggtttccggtaaatggattgcgtgggcatctgtgaactacgattccagctttttcaatcagccaagtgtgttcgccaatttgttttactgtatggccatctggcgttgcgtgcgtctcgcttaggctgtagcgagagttgctacgtgatgcactggtagtgaagcggttagcgtggcgttctgcgccgttgcggaagcgctgttgtgaagaattgcgctgttgcttcatgtcaaaaactccgtacctgtttacttccccggcataacgcccattttcaaaataattgcggcgaaatcccatgttattgggttcgctgtttcgctgttgcttattcattttttgtgcctctacccgataagccaaataacaaacgctatgagcaccgcgccaatagtggtcgggaaaagacctctggtataggcggcgaggtaatgaacgttgagaacaataaagcgctctttttgtcctgttagcttgttaagcagataaatcgctattacacccacttccaggaatacaaggttcagaatggcgctgatgatattgctggtcatttttgtgtgtttagttgccttcgctgcttttgagtcgctccagctttgaacttctgcctgtataaactcgcttaccgttaatggtctggcagtcttctttattagctggaaagaactttcttttctggcggtcatacgtccagtaacttttccagttgtgccattctggtggctcaagttccggtagctcgtcagccagtgcgtcccactctttggcgttaaaccaccatactccgtctgagttttcatcttccgggtttgtgcgcgtcttgtgtcccggcatttgaccgcgatgaatggctacgcgcagtgcagattttgttagcccaatatatgccgcgcctttttccagagagcaaagcccggcgatcggaccatccagccgtaaagtcgctccttttttgtaggaacgctttttcttgttttcttcgtgttcgtcgtcgttggcggcatcaatggatccgctgagtgcgtcactttcctgaagtggttggtggtcagataactctttatcggcaatgaagtcccgcatttgttatcctcttacgttggtgcgcttgttgcgccttgtgatggtttgttttggtttgttttcttcaccctgtggtgaagaccgaaaagaggatactcatcgtatggtgaacatgtcaagagattacgccaaaaaactaaaggcgatcagaaatgcggaaaaacttacacaatctcagttttcgcaagtaacgggggtttctgtagggactataggaaattatgagtctggatataaacctgcgcgaattgaggttgtagaaaaagtaatccaagtcgagcgattcgaaaaatacactatgtggatacttcacgacaaaacatttcccgctgccgggcaggttgcaccggctctctctcttgatggctctattcagtcggagggcgatcaggtttcaatcggcattacccaaaaatcaccccgatcaggccgcaatgttggctgactctacacattgagcgaattacatatcgcaaggagtgtttagttaatttatccgttggaggggctaatcatgtcgattaagcaactcaaagacggacgttatcaggtcgatgtcagaccgcagggggcggaaggaaagcggattcgaaaaatctttgccctgaaatcaaaggctcaggagtttgagaagtatgtgttacagaactttcatgacaagccatggcaggctaagccagctgatcagcggcgattatcagagctgcttgatgcgtggtggatgcttgatgggcgtaatcaggcttacggggatagctacagggttaggctagggaaggttgttcgtgaaatgggagatcctcgcgccagtcagatgacgcgaaaatttatgcttgaatatcggtcagagaaattacaggccggattaatgccgtccagtattaatcgtgacttatgcgtactgtctaccatgttcacggtgctgattgaagctgaggtctttcacaacgcgaaccctgtacgcggtatacgaaaactgaaagttcagaacacagagatggcctttctttctgatgatgagattgaacggcttcttgagcgactggagggtgatgcgcgtcgtgttgccattctgtgtctttctactggtgcccgatggagtgaagcatcggaactacgtggagagcatatcgttggcaaccgggtgacgttctttaacaccaaaaacggaaaatcccgttcggttcctgtggcggattcggtcgtgcctctgattaaaacccgtcgaacggggttattgtatcaggttgattatctgaagttccgggagattcttcaggaggtgaaaccggatttgccgaaggggcaggctacgcatgtcatgcgtcatacgtttgccacacactttatgatgaatggcggaaatattgttacgttgcaacgaatcctggggcacgcaacgattcagcaaacaatgacgtacgctcatttttcgccggactttttacaggacgcgatcaactttaatccgctggctgaaagtgtccataaactgtccatcgattagttataatttgtgttaatttgttccccctgttttggcttattcgttgaaaaataagtaaatcatcagggggagcaagaaacgttaaagcgcctgcgggcgctttttttgtctccctttgataccgaacaataattactcctcacttacacgtaatactactttcgagtgaaaatctacctatctctttgattttcaaattattcgatgtatacaagcctatatagcgaactgctatagaaataattacacaatacggtttgttactggaatcaatcgtgagcaagcttgagtgagccattatgaaaacgaaaatccctgatgcggtattggctgctgaggtgagtcgccgtggtttggtaaaaacgacagcgatcggcggcctggcaatggccagcagcgcattaacattaccttttagtcggattgcgcacgctgtcgatagcgccattccaacaaaatcagacgaaaaggttatctggagcgcctgtacagttaactgtggtagtcgctgcccgctacgtatgcacgtcgtggacggtgaaatcaaatatgtcgaaacggacaataccggcgatgacaattacgacggcctgcaccaggttcgcgcctgcctgcgtgggcgttccatgcgtcgccgtgtctacaatccggaccgcctgaaatatccgatgaaacgagtcggggcgcgcggtgaaggcaaattcgagcgcattagctgggaagaagcctacgacatcatcgcgaccaatatgcagcgcctgatcaaagagtacggcaacgagtctatctatctgaactatggcaccggtacgctgggcggcaccatgacccgctcctggccgccgggaaataccctggtcgcgcggctgatgaactgctgcggcggctatctgaaccattacggcgactactcctccgcgcaaattgcggaaggtttgaactatacctacggcggctgggcagatggcaacagcccgtcggatatcgaaaacagtaagctggtagtgctgtttggtaataaccctggcgaaacgcgaatgagtggcggtggggtgacttactatcttgaacaggcacgccagaaatctaatgcccgcatgatcatcatcgatccgcgctataccgacaccggtgccgggcgcgaagatgagtggatccctattcgtccgggaacagatgccgcactggttaacggtctggcgtacgtcatgatcactgaaaacctggtggatcaggcattcctcgataaatattgcgttggctacgatgagaaaaccttgccagccagtgcgccgaaaaatggccactataaagcttatattctgggtgaagggccagatggcgtggctaaaacgccggaatgggcctcgcaaatcactggtgttccggcagacaaaatcatcaaattggctcgtgaaatcggtagtaccaaaccggcgtttatcagccagggatggggcccgcagcgtcacgctaacggtgaaatcgcaacccgtgctatctcgatgctggcgattctgaccggtaacgttggtattaatggagggaacagcggcgcgcgtgaaggttcatacagcttaccgtttgtccgtatgccgaccttggaaaacccaatccagaccagcatttctatgtttatgtggaccgatgccattgaacgtggcccggaaatgacggcgctgcgtgatggtgtacgcgggaaagataagctggatgtgccgatcaaaatgatctggaactatgccggtaactgcctgattaaccagcattctgaaatcaaccgtacccatgaaatccttcaggatgataagaagtgcgagctgattgtggttatcgactgccacatgacctcatcggcgaaatatgctgacatcctgctgcctgactgcaccgcttccgaacagatggactttgcgctggatgcatcctgcgggaatatgtcttacgtgattttcaacgatcaggtgattaaaccgcgctttgaatgtaagaccatctatgaaatgaccagcgaactggcaaaacgtcttggcgttgagcaacagtttactgaaggccgtacccaggaagagtggatgcggcatctgtatgcccagtcgcgggaagcgattcctgaactgccaacgtttgaagagttccgcaagcaggggatctttaaaaagcgcgacccacaagggcatcacgttgcttataaagccttccgtgaagatccgcaggcaaacccactgactacgccatcgggcaaaattgagatttattcgcaggcgctggctgacattgccgctacctgggaattgcctgaaggcgatgtgatcgatccactgccgatctacacgccgggctttgaaagttatcaggatccgctgaacaaacagtatccgctgcagcttacaggtttccactataaatctcgcgttcactcaacttacggcaacgttgatgtgctgaaagcggcttgccgtcaggaaatgtggatcaacccgcttgatgcgcaaaaacgcggtatcaacaacggcgataaagtcaggatctttaacgatcgtggtgaggttcatattgaggcgaaagtgacgccacgaatgatgccgggtgtggtcgcactgggtgaaggtgcctggtatgacccggatacaaaacgtgtcgataagggcggttgtatcaacgtactgaccactcaacgtccgtctcctctcgctaaggggaatccgtcacatacaaaccttgttcaggttgaaaaggtgtaaggagtaaccgatgacaacccagtatggattttttattgattccagccgttgcaccggttgcaaaacctgcgagctggcctgtaaagactacaaagatttgacgccagaagtcagcttccgccgcatttatgaatatgctggcggcgactggcaggaagataacggtgtctggcaccagaacgtgtttgcctactatctgtcgatttcatgtaaccactgcgaagatccggcttgtactaaagtctgcccgagcggtgcgatgcataaacgtgaagatggttttgttgtggtcgatgaagatgtgtgcattggctgccgctactgccatatggcttgcccgtatggcgcaccgcaatataacgaaacgaaaggccatatgaccaaatgcgatggttgttatgaccgtgttgcggagggtaaaaagccgatctgtgttgaatcttgtccgctgcgggcgctggatttcggccctatcgacgagctgcgtaaaaaacatggcgatctggcggccgttgcgccgttgccgcgagctcactttaccaaaccgaatattgtgatcaaacccaatgccaatagccgcccgaccggggataccactggctatctggcaaacccgaaggaggtgtgagatgggaagtggatggcatgaatggccgctgatgatcttcacggtcttcgggcaatgtgtagcaggtggttttatcgttctggctttggcgctgctcaaaggtgacctgcgagcagaagcccagcagcgtgttatcgcctgcatgtttggtttatgggtgctgatgggcattggctttatcgcctctatgctccatcttggttcaccaatgcgcgcttttaactcgctcaaccgggtaggggcttcagcactcagtaacgaaatctccagcggttcgatcttttttgccgtaggcggcatcggctggttgctggcaatgctgaaaaagctgtcaccggcattgcgtacgctgtggctgatagtgacgatggttcttggcgtcatctttgtctggatgatggtgcgtgtgtataacagcattgataccgttccgacctggtacagcatctggacgccgatgggcttcttcctgacgatgtttatgggcggcccgttactgggttacctgttgttgagtctggctggcgtcgatggctgggcgatgcgtctgctgccagcaatttctgtactggcactggtagtgagtggcgtggtgtcagtgatgcagggcgcagagctggcgactattcatagttctgtgcagcaggccgcagcgctggtgccggactatggtacgctgatgtcctggcggatcgtgcttttggccgttgccctgtgcttgtggattgcaccacagctaaaaggttatcagcctgcggttccgctactttctgtatcattcattctgcttctggcaggggaattaatcggtcgcggcgtattctatggtttgcatatgaccgtggggatggccgtcgcaagctaatcataacaaccggggtttcggccccggttctcttttatttctgcttcgttaacgtgtcataactggtcatcaaattacgataatcaggaatgtggttagagaacaacgtcgccagtccttcaatatcattacgccagtcgcgatgcagctcgcacgccacgccgaaccatgtcatcaattgcgcaccagcttgcgacaagcgatcccatgccgaatgccgggtaatttcattaaaggtccctgacgcgtcagtcacgacaaagacgtcaaacccttcttcaatggctgaaagcgccgggaatgccacgcaaacttcggttaccacaccggcaataattaactgttttttacctgtcgctttgacagcttttacaaaatcttcgttatcccaggcgttaatatttcccgggcgagcaatgtaaggtgtatcggggaattgtgctttcagttctggaactaatgggccgttaggaccggtttcaaaactgatggtaagaatagttggtaagttgaaatacttagccaggtcacccagcgccagcacgttatttttaaacttatcgggttcgatatcccgtacaagggaaagtaaaccagcctggtgatcaacaagcaaaacggcagcatcatttttatcaagacgaacatacggtttggtcatcctcttctcctttcgagagtcagtggtacgtctgaaatcgatcagacgcgatgcattgctctgaaagcatagacgggaaatatgagtttgctgtgaccatgaaatttttcgactgaacgaagcgtatgaaatttgtgttagttcaataaaaacaatcagatgagactaatcatctcttcagcattagcgttatgaatgagtaatataaatcgataataccgccgctgggatatcgcgtattttcacccattgacaatgtttttggcggtggcatgatgcgcatgaaatttgaacttcctcacggttttaattcatgtccacgtatacccggcctgtcatgcttttgctgtctggcctgcttttgttgactctggcgattgcggtgttaaatacactcgtgccgctttggctcgcccaggaacacatgtccacatggcaggtaggcgttgtcagctcatcctattttaccggcaaccttgtcggtacattgctgacagggtatgtcattaagcgcattggctttaaccgcagctattatctggcctccttcatttttgccgctggctgtgccggccttggcctgatgattggattctggagctggttggcttggcgttttgtcgcgggcgtcggctgtgccatgatttgggtggttgttgagagcgcgctgatgtgcagtgggacgtcacgtaaccgtgggcgtttgcttgctgcgtatatgatggtttattacgtgggaacgtttttaggccagttactggtcagcaaagtttcaaccgagctgatgtccgtattgccgtgggttacaggtttgacgttggcagggatcttaccgctgttgtttacgcgtgtgctgaatcagcaggctgaaaaccatgattcgacgtcaattacgtcaatgctaaaactccgtcaggcgcggcttggcgtgaatggctgcattatctcaggaatcgttctgggatctctatatggcctgatgccgctgtacctcaatcacaaaggggtgagcaatgccagcattggtttctggatggcggtactggtcagtgcgggtatccttggacaatggccgattggacgtctggcggataagtttggtcgactgctggtgttgcgtgttcaggtctttgtcgtcattctcggcagtatcgcgatgcttagccaggcggcgatggccccagcgttattcatcctcggtgccgctggctttacgctatatccggtggcgatggcatgggcttgcgagaaagttgaacatcatcaactggtggcgatgaaccaggccttactgttgagctatactgtgggaagtctgcttggcccgtcatttaccgctatgctaatgcagaatttctccgataatttattgtttatcatgatcgccagcgtatcgtttatctatttgctgatgctgctgcgcaacgccggtcatacgccgaaacccgttgctcacgtgtaaatgaattcaagcagagtgtgaacctactgtttcacactctgcttttttgtttcttctatctgacttgctttattccaaattttattcgtttaaaaataaaatgtgcagcaggttataattttgcatttcgctatttccgcacttcttatttgccgcgcataatccctcgttttacagatgcccctttaattttggcgaaggatttgtctatggctgggaatgttcaggaaaaacagttgcgatggtacaacattgcgctgatgtcttttatcactgtctggggttttggcaacgttgttaataactatgccaaccaggggctggtggttgttttttcatgggtgtttatctttgcactctatttcacaccttatgcgctaattgttggtcagttaggctcgaccttcaaagatgggaagggcggggtcagtacttggattaaacacacgatgggacccggactggcttatctcgccgcgtggacctactgggtggtgcatattccctatctggcacaaaaaccccaggcaattctgattgcgctcggttgggcgatgaaaggcgacggttcgctaatcaaagaatattcagtcgtagcgttacaggggttaacgctggtgctgtttatcttctttatgtgggttgcttcacgcggtatgaaatcgctgaaaatcgtcggttctgtggcagggattgctatgtttgttatgtcgctcctgtatgtggcgatggcggtaaccgcgcctgcaattactgaagtgcatattgcgaccacaaacattacctgggaaacgttcattcctcatatcgactttacctacattaccactatttcaatgctggttttcgcggttggcggagcagagaagatttctccttacgttaatcaaacgcgcaacccaggaaaagaatttccaaaagggatgttatgcctggcggtgatggttgcggtttgtgccattctgggctcgctggcgatggggatgatgtttgattcgcgtaatatcccggatgacttaatgaccaacggtcagtattacgcctttcagaagctgggcgagtattacaacatgggtaatactttaatggtgatttacgccattgcgaataccctgggacaagtagcggcgctggtattctcgattgatgccccgcttaaagtgctattaggtgatgctgacagcaaatatattccagccagtttatgtcgtaccaacgcttctggtacgcccgttaatggctattttctgaccctggtactggtggcgattctgattatgctgccgactctcggcattggtgatatgaacaatctctataaatggctgttgaaccttaattcggtagtgatgccgctgcgttatttatgggtatttgttgcatttattgcagtcgttcgcttggcgcagaaatataaaccagaatatgtctttattcgtaataagcctctggcaatgaccgtcgggatttggtgttttgcctttaccgcctttgcctgtttgacggggatcttcccgaaaatggaagccttcactgcagagtggaccttccagttggcgctgaatgttgcaacgccgtttgtgctggtaggattaggactgatattcccgctgctggcgcgtaaagcgaatagtaaataattattgtggtcggtgacgctgactctggcagatctgacccgtttttacataatcgagaaatgcgcgcaagccgcaggacatatactggcggtttggataatagatctggaagcctggacgctctgtgctccagtcttccagtacacattctaaacgaccagtatcaaggtactccttgatctgttcatagagcagatacccgataccagcacccatcaaaacggcctccagttcagcatcaacatcatccagaatgatatttcctgcgacagcaatttccagctcctttgcaaattgccagtggaaaggtttgccgctgggataacgaaaaacaacacattgatgattaagcagatcatgaggatggcggggtttgccatatcttgcaaagtactctggcgttgctgctacacataatttcactggcgggccgatcgccacgctgatcatatctttttcgacgatgcaactaagtcgaacgccagcgtcaaagccctgttggacgatatcgacaagagagtcgtcagttgtgagctcgactttaatatcaggatattcacgtgtgaaaccaaccagtaaagacattaaaaatatacgtgcagctacccgggcggcattgattttgagcgttcctgtcggtgtcagacgaaaatcattcatctcatctaacatgatctgaatttcgtcgaaagctgggcgcaatcgttcatagagattagaacccgcttccgttaacgatacgcttcgggttgtccgattgaataagcgaattttaagacgttgttccagtgttttaatactatggctaatggcggacgaggataagcctaactcatcgcccgctgcacgaaagctttgattacgggccacggcaaagaaagtggcaaagtcagacatattcatccgcattagtgaaaatccttcattaactcatcctgaatcatcacgtttacaggattatgccgcctgcgtaaagtgcgctccagaacttaacgtggaggtaaaattatgcagtctgaacgtatttatttggtatgggcccatcctcgtcatgattcattgaccgcacatattgctgatgcgatccatcagcgggcaatggagcggaaaatacaggtgacggaactcgatttatatcggcgtaatttcaacccagtgatgacgccggaagatgaaccagactggaagaatatggataaacgttattctccagaggttcatcagctttattcagagctgcttgaacatgacacgttagtggtggtttttcctctctggtggtacagcttcccggcaatgctaaaaggatatattgacagagtatggaataatgggctggcttatggagatgggcacaaattaccattcaataaagttcgttgggtggcgctggttggaggagacaaagaatcatttgtccagatgggctgggaaaaaaatataagcgattatttaaaaaatatgtgcagttatcttggtattgaagatgccgatgtcactttcttgtgtaatacagtggtattcgatggggaagaacttcacgcgagctattatcagtcgttattatctcaggtacgggatatggtagatgcactataagatgtgttaaaaacgctgtagcagaatgaagcgcggaataaaaaagcggcaactcaataaagttgccgctttacggggaaattagaacattaccttatgaccgtactgctcaagaatgcctttcacgcgttccatggtctctttcttcggtggtttaacaccgtcgagtttgtactcttcacccattgccacccatttgtgtttgcccagctcgtggtaggggagaagctcgattttctcaacgttgcccatatcacgggtaaattcaccgaggcgatgcgctgaatcgtcatcgtcagaccagcctgggacaacaacgtagcggatccacaccttcacatttttgttcgccagatatttagcgaactccagcgtgcggtggttggaaactccaaccagattttggtggatctcgtcgttcatctgtttgagatcgagcattaccaggtcggttacttccagcagttcatcaatcaccggatcgtaacgacgaacaaaaccgttggtgtccagacaggtatgaatgccttcttttttgcaggcgcggaaccagtcacgaacaaactcagcttgcaggattgcttcaccgccggatgcggtaacgccgccgccggaagcgttcataaagtggcgataggtcaccacttccttcatcaaatcttcaacggtaacttctttaccgccatgcgtgtcccaggtgtcgcggttatgacaatacaggcagcgcatcaggcagccctggaaaaaggtgataaagcgaatacccgggccgtctacggttccacaggattcaaaggagtgaatgcgaccaataactgacattgcggtgtttctccagatgtggcccatctgaggccgtgttggtgcgcagctcgaaggctacgtcgagtctgttttggcagtcaccttaaagtatagatagctgacaaaaaaggctctcgcgctaaaaaaggccccactttcgtggagcctttattgtacgctttttactgtacgatttcagtcaaatctaattacatagattgagtgaaggtacgagtaataacgtcctgctgctgttctttagtcagcgagttgaaacgtactgcgtagccagatacacggatggtcagctgcggatatttttccgggttttccatcgcgtcgagcagcatttcacggttcatcacgttaacgttcaggtgctgaccaccttcgatggatgcttcgtggtggaagtaaccatccatcagaccagccaggttggtcttacgaacttcgtcgtctttacccagtgcgttcggaacgatagagaaggtgtaggagataccatctttagcgtaagcaaacggcagtttagcaacggaagtcagagaggctactgcacctttctggtcacgaccgtgcatcgggttagcacccggtccgaacggcgcgccagcacgacgaccgtctggggtgttacccgttttcttaccatacacaacgttagaagtgatggtcagaacagactgagtcgggatagcgtcacggtaggtgtgcagtttctgaattttcttcatgaaacgttctaccaggtcaacagccaggtcatctacacgcggatcattgttaccaaactgcgggtattcgccttcgatttcgaagtcgatagccagaccgtcttcgtcacgaatcggtttaactttcgcatatttgattgcagacagggagtcagcagcaacggacagaccagcgataccacacgccatggtgcggataacgtcacggtcgtgcagcgccatcagagaggcttcgtagctgtacttgtcgtgcatgtagtggatgatgttcagtgcagtgatgtactgtttagccagccagtccatgaagtgatccatgcgctccatcacttcatcatagttcaggacatcgcctttgatcggttcagacttcggaccaacctgcattttcagtttttcgtcaacgccgccgttgattgcgtacagcatggttttcgccaggtttgcacgcgcaccgaagaactgcatttgtttaccaacgatcatcgggcttacgcagcaagcaatagcgtagtcatcgttgttgaagtccggacgcatcaggtcatcgttctcatactgcagagaagaggtgtcgatggacactttagcggcgaatttcttgaagttcagcggcagtttttcagaccacagaatggtcatgttcggttccggagacggacccatggtgtacagggtgttcaggaaacggaagctgtttttggtaaccagggtacgaccgtcgaggcccataccaccgatagattcggttgcccagatcgggtcgccagagaacagttcatcgtattccggagtacgcaggaagcgaaccatacgcagtttcatgaccaggtggtcaaccatttcctgcgcttcttgttcggtgatcttgccagctttcaggtcacgttcgatgtacacatccaagaaggtggaggtacgaccgaaggacattgcagcaccgttctgagacttaacagcagccaggtagccgaagtaagtccactggatagcttcctgagcgttggtagccggaccagagatgtcgtagccgtatttcgcagccatttctttcatctgacccagagcgcggtgctgttcagcgatttcttcgcgcagacggatagtctgttccaggtttacgccgttttccagatcagcctgcagagaagtgaactgtgccagtttgtctttcatcaggtagtcgataccgtacagcgcaacgcgacggtagtcaccgatgatacggccacggccatatgcatctggcagaccggtcagaacaccagatttacggcaacgcaggatgtccggagtgtaaacgtcgaacacgccctggttgtgagttttacggtattcagtgaagatttttttgatcatcggatccagttcgcggttgtacgctttgcaggaaccttcgatcattttgataccaccgaacgggataagagcacgtttcagcggagcttcagtctgcagaccaacgattttctcaagctgcttgttgatgtagccagcgtcgtgagaggtgatggtggaagcaacagcggtgtcaaagtcaactggcgcgtgagtgcggttttccagtttaacgccttccattactttgtcccacagggtggtggtcgcttcagtagcgccagccaggaaggactcgtcaccctcgtacggagtgtagtttttctgaatgaagtcacggacgtttacttcattctgccagtcacctttggtaaaaccttcccaggctgtggctaacttttcattaagctcggacatgtaacacctaccttcttaagtggattttttatttactgcgtacttcgacaaccattaatggtggtcgttttcacgcaggtaaatgacccagtatgtcaacccaaccaacaaaccaccaccgataatgttgccgatcgtaaccggaatcaggttatcagtgatgaaattcatcacggtcaggtgagaaaaattttccggtgcagaaccgactgcggtccaaaattccggggatgcgaagtcgcggattacaatacccatcgggatcataaacatgtttgcgatactgtgctcaaaaccgctggcaacaaacatcgcgaccggcagcaccataatgaacgctttgtccatcaggctgcggccagaataactcatccatactgccagacataccatcaggtttgccaggataccaagacagacggcctcaataaaagtatggtgcactttgtggtcggcggtttgtaggacgtttagtccccattgaccatttgcggtcatatactcgccggaaagccacattaaaagtacaaacagcagtgcgccgaccaggttgccaaaatagacatttagccagtttttcgccaactgaccccaggtgatgcgcccactcgccttagcaacaacaatcaacacggtggaagtaaagagatcggctccgcagacaacacaaagaatcagccccagagagaagcaaatgccgccaaccagttttgccatgccgaagggcattgtgcctgtgccagtggttgctgtgatatagaagacgaatgcgattgagatgaaaacaccggcggtaatcgccagatagaaagtcttaagcggatgtttcgttgctttatagacacccgcctcttcggccactttggccattgcagcaggaagtaaaagatcaaaagggttgtcagctttcacactaactctctctttattaagtcggcgacgagatactaacaaagcattatagatgagaaattgatatagatcatatctcgcctggcttataggcccgtaactcgcatggtttttatgcaaatacggagtaaatatttgattatccaaataaaaataaattttaaaaattaacaaatgagttgaattttttccgcatcctccgctaaaacagttaattaaaagggagcatcaggcgaataaagtaacaatatcgatcgtatttattaaatacaaattaccgatatttaaccttataattacaattattttattaatgcaaatatatgtaaagcggggcattaaaaaaacgccccgtaatataactcagactaatcattaagcctacattgcgtaggctatttgattttattttgcccagaatgctgctttggcgcgctgcagcttttcgtaggccttcaacaacgactgatgtgcagcaaacgcgtgcagatcgctatctaccggttgcaggccgtaaaacgccgcttcgccgctcattgccgcactggcggcttctacggcatctgcgccgtacatgcgaacaaacgcattcagatattgcagcggctggcgatcttcttcctgtgccagtaataacaacgtttgcaggcagcgataatagttggcgcgttccggactaaatactgatgagttaaactccatcgtccattcggtccagaccagagcctgttccagatcgccaccagccagcgccagcatggcttttaattcaccgatacgcagggtgtaccaaccgttatccgacccggtcgccagacccaacagctcacgcacgcgggtaaagtcatcaaaaccttcttcatccagttgctcgatgaggttcaggtaatcttctttttcccactcgctgcctggtagcgaaagaatcgtttcacgtaaatggctgcccatactgttattcgcgagccacagatcttcagccggataaatatcggacatgccaggcacgataatacggcaagcataaacgcccagatgctcgtaatcggcaatataaacttctttatcttctttgttgaagatagccatcagtgtggcgaactcttcttccgtggtgccggagaaattccagtccacaaacggataatcggcatcctgcttgaacaggtcccaggagattaaaccgctggaatcgataaagtgcgtttcgaggttggtatgttcagcgacttcttcatcatcgaaggttggcggagtaaacacatccaaatctttcaggccacgaccttgcagcagctcggtcacggtacgttccagtgctacgccaaaatcaggatgcgcaccgaaagaggcaaagcaggtaccgttagcaggattgaacagtaccacgcaaatcaccggatactggccgccaagcgaaccgtcataagcgaagattgggaaaccctccgcttccagcgtttcgatggcttcaactactgctgggtaacgcgccagcacgtctgccgggatctctggcaggctgatgctttcagcaataatgcggtttttcacgtagcgttcgaaaacttcagacaatccctgaacgcgtgcttcgttgcgggtattacctgcggacataccgttggagacgtacaggttaccaatgatattcatcggaatataaacggtctgattgtcggactgacgcgtaaacggcaggccgcaaataccacgatcttcgttaccggattgtaggtcaatcagcatgctgccggtcagttcattctccggatcataaaacgcgcgcagacggtcatcgagcagcccttctggcacatcgtcattttcggtcagtgggaaccatttttcgttgggataatgcacgaacggaccgttggcgatggtttcgcccagccagaagtccgcaaaaaagtagttggttgagagacgctcgaaatattcaccgagtgcagaagccagcgccgctttcttggttgcgcctttaccgttggtaaaacacagtgcgcactctttgtcgcgaatatgtacagaccagacgttaggcacgggattcagccaggaggcctcttcaatctgaaagccgaggtctgaaagtttttgctggaagcgagcgatggaatcttccagagcggcatctttgccggggataaatgtttgcgtcatgaaaatcactttagtcgtacggaaagcgcgcaataatacgggttttatctcaaaggcgctatcaccgccgccatgccgatgaactgttgactatgcttttagcggataaaccacgttaagagcataaaaatgaaggcgttcgatctccaccgtatggcatttgataaagtgccttttgatttccttggcgaagttgcactacgtagtctttatacctttgtactggtctttttgttcctcaaaatgaccggaagacgcggtgtgcggcagatgtcgctgtttgaagttttaatcattctgacgctgggatcagcggcgggagatgtggcgttttatgatgatgtgccgatggtcccggtacttatcgtctttattactctggcgttgttataccgcctggtaatgtggttgatggcgcacagtgaaaaactggaagatcttctggaaggcaagccagttgtcattattgaagatggcgagctggcctggtcgaaactcaataactccaacatgacggaatttgagttctttatggagctacgattgcgtggcgtggagcagctggggcaggtacgtctggcgattctcgaaaccaacgggcaaatcagtgtctatttctttgaagatgacaaggtgaaaccgggtttacttattttacccagtgattgtacgcagcgttacaaagtggtgccggagtcggcggactatgcctgtattcgttgtagtgaaatcattcatatgaaagcgggggaaaaacaattatgtccgcgctgtgcaaatccagaatggacgaaggcaagtcgggcaaaacgggtgacctgacagtaaaaacatcggctttttgctaataatccgagagattcttttgtgtgatgcaagccacatttttgccctcaacggttttactcattgcgatgtgtgtcactgaatgataaaaccgatagccacaggaataatgtattacctgtggtcgcaatcgattgaccgcgggttaatagcaacgcaacgtggtgaggggaaatggctcaaatcttcaattttagttctggtccggcaatgctaccggcagaggtgcttaaacaggctcaacaggaactgcgcgactggaacggtcttggtacgtcggtgatggaagtgagtcaccgtggcaaagagttcattcaggttgcagaggaagccgagaaggattttcgcgatcttcttaatgtcccctccaactacaaggtattattctgccatggcggtggtcgcggtcagtttgctgcggtaccgctgaatattctcggtgataaaaccaccgcagattatgttgatgccggttactgggcggcaagtgccattaaagaagcgaaaaaatactgcacgcctaatgtctttgacgccaaagtgactgttgatggtctgcgcgcggttaagccaatgcgtgaatggcaactctctgataatgcggcttatatgcattactgcccgaatgaaaccatcgacggtatcgccatcgacgagacgccagacttcggcaaagatgtggtggtcgccgccgacttctcttcaaccattctttcccgtccgattgacgtcagccgttatggtgtaatttacgctggcgcgcagaaaaatatcggcccggctggcctgacaatcgtcatcgttcgtgaagatttgctgggcaaagcgaatatcgcgtgtccgtcgattctggattattccatcctcaacgataacggctccatgtttaacacgccgccgacatttgcctggtatctatctggtctggtctttaaatggctgaaagcgaacggcggtgtagctgaaatggataaaatcaatcagcaaaaagcagaactgctatatggggtgattgataacagcgatttctaccgcaatgacgtggcgaaagctaaccgttcgcggatgaacgtgccgttccagttggcggacagtgcgcttgacaaattgttccttgaagagtcttttgctgctggccttcatgcactgaaaggtcaccgtgtggtcggcggaatgcgcgcgtctatttataacgccatgccgctggaaggcgttaaagcgctgacagacttcatggttgagttcgaacgccgtcacggctaatgccgaaattttgcttaatccccacagccagcctgtggggtttttatttctgttgtagagagttgagttcatggaatccctgacgttacaacccatcgctcgtgtcgatggcactattaatctgcccggttccaagagcgtttctaaccgcgctttattgctggcggcattagcacacggcaaaacagtattaaccaatctgctggatagcgatgacgtgcgccatatgctgaatgcattaacagggttaggggtaagctatacgctttcagccgatcgtacgcgttgcgaaattatcggtaacggcggtccattacacgcagaaggtgccctggagttgttcctcggtaacgccggaacggcaatgcgtccgctggcggcagctctttgtctgggtagcaatgatattgtgctgaccggtgagccgcgtatgaaagaacgcccgattggtcatctggtggatgctctgcgcctgggcggggcgaagatcacttacctggaacaagaaaattatccgccgttgcgtttacagggcggctttaccggcggcaacgttgacgttgatggctccgtttccagccaattcctcaccgcactgttaatgactgcgcctcttgcgccggaagatacggtgattcgtattaaaggcgatctggtttctaaaccttatatcgacatcacactcaatctgatgaagacgtttggtgttgaaattgaaaatcagcactatcaacaatttgtcgtaaaaggcgggcagtcttatcagtctccgggtacttatttggtcgaaggcgatgcatcttcggcttcttactttctggcagcagcagcaatcaaaggcggcactgtaaaagtgaccggtattggacgtaacagtatgcagggtgatattcgctttgctgatgtgctggaaaaaatgggcgcgaccatttgctggggcgatgattatatttcctgcacgcgtggtgaactgaacgctattgatatggatatgaaccatattcccgatgcggcgatgaccattgccacggcggcgttatttgcaaaaggcaccaccacgctgcgcaatatctataactggcgtgttaaagaaaccgatcgcctgtttgcgatggcaacagaactgcgtaaagtcggtgcggaagtagaagaggggcacgattacattcgtatcactccaccggaaaaactgaactttgccgagatcgcgacatacaatgatcaccggatggcgatgtgtttctcgctggtggcgttgtcagatacaccagtgacgattcttgatcccaaatgcacggccaaaacatttccggattatttcgagcagctggcgcggattagccaggcagcctgaatgaacaacgggcaataaatagccaaatctttctttatcaaaacgtcggcacattgtcggcgttttttttcggaccttgtgagtcattttgattaatggtagcgtcgcttgtcaatgtaagttgttgatacataatatttatatatgattaatcaacggatgattcacatgaagaatactaaattactgctggcgattgcgacctctgcagcattactgacagggtgtcaaaatacccacggtattgataccaatatggctatcagctccggtttaaatgcctataaagcagcaacattaagcgatgccgatgcaaaagcgattgccaatcagggctgtgccgaaatggacagcggcaatcaagtcgcaagtaaatccagcaagtacggtaaacgtctggcaaaaatcgccaaagcattgggtaacaatattaatggcacgccggtcaactataaggtttatatgaccagcgacgtcaacgcatgggcgatggcgaacggctgtgttcgtgtctacagtggcctgatggacatgatgaatgacaacgaaattgaaggcgttctgggccatgaactgggccacgtcgcgttgggtcactcgctggctgaaatgaaagcttcttatgcgatcgttgccgcacgcgatgccatttcagctaccagcggtgtggcttcccagctttcccgctcacaattaggtgatatcgcagaaggcgctatcaatgctaaatactcccgtgataaagagtccgaagcagatgatttctcctttgatctgttgaagaaacgtggcatcagcacccaggggctggttggcagctttgaaaaactggctagcctggatggcggtcgcacccagtccatgtttgactctcacccaccatcaacagagcgtgcgcaacacatccgtgatcgtatcgcctctggtaagtaaatcattgtcatctttcgggctggtcttctgccagcccgctataattgcgcaataaatccccatctgaatacagacaaaactggtttttgcacacaacgttaacgatttgtggcgtcggcgcgtataatgcgcgcggttatgttaacggtacgcctgttttaaggagataaagatgacggcaattgccccggttattaccattgatggcccaagcggtgcagggaaaggcaccttgtgtaaggctatggcggaagcgttgcaatggcatctgctggactcgggtgcaatttatcgcgtactggcattggcggcattacatcaccatgttgatgttgcgtcggaagatgcgctggtaccgctggcatcccatctggatgtacgttttgtgtcgaccaatggcaatctggaagtgatcctcgaaggggaagatgtcagcggcgaaattcgtactcaggaagtggcgaatgcagcttcacaagtcgcggcattcccacgcgttcgtgaagcattattgcgtcgccaacgcgcgtttcgcgaattaccaggtctgattgccgatggccgcgacatgggaacggtggtattccctgatgcaccagtgaaaattttccttgacgcctcctcggaagaacgtgcgcatcgccgcatgctacagttgcaggagaagggctttagtgttaactttgagcgccttttggccgagatcaaagaacgcgacgaccgcgatcgtaaccgagcggtagcgccactggttccggcagccgatgctttagtgttggattccaccaccttaagcattgagcaagtgattgaaaaagcgctacaatacgcgcgccagaaattggctctcgcataagcgaccgaatttgcagtacccccgttgcaatggaatgacagcgggtatgttaaacaaccccatccggcatggagccaggtggacgttaaatataaacctgaagattaaacatgactgaatcttttgctcaactctttgaagagtccttaaaagaaatcgaaacccgcccgggttctatcgttcgtggcgttgttgttgctatcgacaaagacgtagtactggttgacgctggtctgaaatctgagtccgccatcccggctgagcagttcaaaaacgcccagggcgagctggaaatccaggtaggtgacgaagttgacgttgctctggacgcagtagaagacggcttcggtgaaactctgctgtcccgtgagaaagctaaacgtcacgaagcctggatcacgctggaaaaagcttacgaagatgctgaaactgttaccggtgttatcaacggcaaagttaagggcggcttcactgttgagctgaacggtattcgtgcgttcctgccaggttctctggtagacgttcgtccggtgcgtgacactctgcacctggaaggcaaagagcttgaatttaaagtaatcaagctggatcagaagcgcaacaacgttgttgtttctcgtcgtgccgttatcgaatccgaaaacagcgcagagcgcgatcagctgctggaaaacctgcaggaaggcatggaagttaaaggtatcgttaagaacctcactgactacggtgcattcgttgatctgggcggcgttgacggcctgctgcacatcactgacatggcctggaaacgcgttaagcatccgagcgaaatcgtcaacgtgggcgacgaaatcactgttaaagtgctgaagttcgaccgcgaacgtacccgtgtatccctgggcctgaaacagctgggcgaagatccgtgggtagctatcgctaaacgttatccggaaggtaccaaactgactggtcgcgtgaccaacctgaccgactacggctgcttcgttgaaatcgaagaaggcgttgaaggcctggtacacgtttccgaaatggattggaccaacaaaaacatccacccgtccaaagttgttaacgttggcgatgtagtggaagttatggttctggatatcgacgaagaacgtcgtcgtatctccctgggtctgaaacagtgcaaagctaacccgtggcagcagttcgcggaaacccacaacaagggcgaccgtgttgaaggtaaaatcaagtctatcactgacttcggtatcttcatcggcctggacggcggcatcgacggcctggttcacctgtctgacatctcctggaacgttgcaggcgaagaagcagttcgtgaatacaaaaaaggcgacgaaatcgctgcagttgttctgcaggttgacgcagaacgtgaacgtatctccctgggcgttaaacagctcgcagaagatccgttcaacaactgggttgctctgaacaagaaaggcgctatcgtaaccggtaaagtaactgcagttgacgctaaaggcgcaaccgtagaactggctgacggcgttgaaggttacctgcgtgcttctgaagcatcccgtgaccgcgttgaagacgctaccctggttctgagcgttggcgacgaagttgaagctaaattcaccggcgttgatcgtaaaaaccgcgcaatcagcctgtctgttcgtgcgaaagacgaagctgacgagaaagatgcaatcgcaactgttaacaaacaggaagatgcaaacttctccaacaacgcaatggctgaagctttcaaagcagctaaaggcgagtaattctctgactcttcgggatttttattccgaagtttgttgagtttacttgacagattgcaggtttcgtcctgtaatcaagcactaagggcggctacggccgcccttaatcaatgcagcaacagcagccgcttaatttgcctttaaggaaccggaggaatcatgaccaagtcagaattgatagaaagacttgccacccagcaatcgcacattcccgtcaagacggttgaagatgcagtaaaagagatgctggagcatatggcctcgactcttgcgcagggcgagcgtattgaaatccgcggtttcggcagtttctctttgcactaccgcgcaccacgtaccggacgtaatccgaagactggcgataaagtagaactggaaggaaaatacgttcctcactttaaacctggtaaagaactgcgcgatcgcgccaatatttacggttaagttttttactcaaacttgaacgagagaaaagcacctgtcgggtgcttttttcatttctctaatctggaactggaagctgcctcgcagagttttgaacagttttcaccctttcgttaaattcttctgaatatgcctcggggaacgcaaaattcccaccagacaaccgctcaacaaagttgcacactttccataaacagggaggggtgcatgaaaataacgacagtcggtgtatgcataattagcggaatttttccgttgctgattttgccccaattgcctgggacattaacccttgcgtttctgactctcttcgcctgcgtactggcatttatccctgttaaaaccgtccgttatatcgcgctgacgttgctgtttttcgtttggggcatattatcagcaaagcaaattttgtgggcaggagaaaccttaactggcgcgacgcaggatgcaattgttgagatcactgcaactgacggcatgaccactcattacggtcaaattactcatctacaaggtcgacgtatattccctgcgtcaggtctcgtgatgtatggcgaatatcttccgcaagcggtttgtgctggacaacaatggtcaatgaaactcaaagttcgtgcagttcatggccaacttaatgatggcggctttgatagccagcgttatgccattgcccagcatcagccgctcaccggccgttttctgcaggcaagtgtcattgaaccgaattgtagcctgcgtgcacagtatctggcgtcactacaaacaacgctgcaaccctatccgtggaatgcggttattcttggtttaggtatgggggaacggttatccgtccccaaagaaatcaaaaatatcatgcgcgatactggaacggcgcatttaatggcgatatcgggattgcacatcgcttttgcggcgttgctggctgccggactcattcgcagtggacaaatttttctgcctgggcgctggatccactggcaaataccattaattggcggaatctgctgtgctgctttttatgcctggttgacgggaatgcaacctcctgcattgcgtaccatggtggcgcttgctacgtggggaatgcttaagttaagtgggcgacagtggagtggctgggatgtatggatatgttgtctggcggcaattttgctgatggatcctgttgccattctctcgcaaagtttatggctctctgccgctgcggtcgcggcattgatattttggtatcagtggtttccctgtcctgagtggcaactgccgccggtattgcgtgcagttgtttccctcatccatctgcaactgggaatcacacttctgcttatgcccgtgcaaatcgtcatatttcatggcattagtctgacctcgtttattgcaaatctattagcaattcccttggtgacatttatcacggttccgttgatcctcgccgcgatggttgtgcatttaagcgggccgttaatcctggagcaagggttatggtttcttgccgaccggtctttggctttacttttctgggggttaaagagtttgccggaagggtggatcaacattgctgaatgttggcaatggctatcattttccccatggttcttactggtggtatggcgattaaacgcctggcgaacgttgccagcaatgtgtgtggctggaggcttgctgatgtgctggccgctgtggcaaaaacctcgacctgacgagtggcagctgtacatgcttgatgtcgggcaagggctggcaatggtgatagccagaaacggcaaagcgattctctatgacacaggactggcctggcctgaaggggatagtgggcaacaactgattatcccctggctccactggcataatcttgaaccggaaggcgttattctgagccatgaacatctggatcaccggggagggctggattcaatattgcatatatggccgatgttatggatcagaagtccgttaaactgggaacatcatcagccctgtgtgcgtggcgaagcgtggcaatggcaaggattgcgtttcagcgcgcactggcctttacaaggtagcaacgataaaggaaataaccattcctgtgtggttaaggttgatgacgggacgaatagcattcttctaaccggtgatattgaagccccagctgaacaaaagatgctaagccgttactgacagcaagtgcaggcaacattgcttcaggtacctcaccatggcagtaatacctcatcatcgttgccattaattcagcgagtgaatggaaaagtggcactcgcatcggcatcgcgctataacgcatggcgactgccctctaacaaagttaagcatcgctatcaactgcaaggatatcaatggattgatactccacatcaaggtcaaacaacggtcaatttttcagcgcaaggctggcggattagcagcctcagggagcaaattttacctcgttggtatcatcagtggtttggcgtgccagtggataacgggtagaatatgcggctatttcaacaaatgctggttttttgaatgcataacgacaaagatctctctacgtggcagacattccgccgactgtggccaaccattgcgcctttcaaagcgggtctgatcgtggcgggcgtagcgttaatcctcaacgcagccagcgataccttcatgttatcgctccttaagccacttcttgatgatggctttggtaaaacagatcgctccgtgctggtgtggatgccgctggtggtgatcgggctgatgattttacgtggtatcaccagctatgtctccagctactgtatctcctgggtatcaggaaaggtggtaatgaccatgcgtcgccgcctgtttggtcacatgatgggaatgccagtttcattctttgacaaacagtcaacgggtacgctgttgtcacgtattacctacgattccgaacaggttgcttcttcttcttccggcgcactgattactgttgtgcgtgaaggtgcgtcgatcatcggcctgttcatcatgatgttctattacagttggcaactgtcgatcattttgattgtgctggcaccgattgtttcgattgcgattcgcgttgtatcgaagcgttttcgcaacatcagtaaaaacatgcagaacaccatggggcaggtgaccaccagcgcagaacaaatgctgaagggccacaaagaagtattgattttcggtggtcaggaagtggaaacgaaacgctttgataaagtcagcaaccgaatgcgtcttcaggggatgaaaatggtttcagcctcttccatctctgatccgatcattcagctgatcgcctctttggcgctggcgtttgttctgtatgcggcgagcttcccaagtgtcatggatagcctgactgccggtacgattaccgttgttttctcttcaatgattgcactgatgcgtccgctgaaatcgctgaccaacgttaacgcccagttccagcgcggtatggcggcttgtcagacgctgtttaccattctggacagtgagcaggagaaagatgaaggtaagcgcgtgatcgagcgtgcgactggcgacgtggaattccgcaatgtcacctttacttatccgggacgtgacgtacctgcattgcgtaacatcaacctgaaaattccggcagggaagacggttgctctggttggacgctctggttcgggtaaatcaaccatcgccagcctgatcacgcgtttttacgatattgatgaaggcgaaatcctgatggatggtcacgatctgcgcgagtataccctggcgtcgttacgtaaccaggttgctctggtgtcgcagaatgtccatctgtttaacgatacggttgctaacaacattgcttacgcacggactgaacagtacagccgtgagcaaattgaagaagcggcgcgtatggcctacgccatggacttcatcaataagatggataacggtctcgatacagtgattggtgaaaacggcgtgctgctctctggcggtcagcgtcagcgtattgctatcgctcgagccttgttgcgtgatagcccgattctgattctggacgaagctacctcggctctggataccgaatccgaacgtgcgattcaggcggcactggatgagttgcagaaaaaccgtacctctctggtgattgcccaccgcttgtctaccattgaaaaggcagacgaaatcgtggtcgtcgaggatggtgtcattgtggaacgcggtacgcataacgatttgcttgagcaccgcggcgtttacgcgcaacttcacaaaatgcagtttggccaatgatcgaaaaaatctggtctggtgaatcccctttgtggcggctattgctgccactctcctggttgtatggcctggtgagtggcgcgatccgtctttgctataaactaaaactgaagcgcgcctggcgtgcccccgtaccggttgtcgtggttggtaatctcaccgcaggcggcaacggaaaaaccccggtcgttgtctggctggtggaacagttgcaacagcgcggtattcgcgtgggggtcgtatcgcggggatatggtggtaaggctgaatcttatccgctgttattgtcggcagataccacaacagcacaggcgggtgatgaacctgtgttgatttatcaacgcactgatgcgcctgttgcggtttctcccgttcgttctgatgcggtaaaagccattctggcgcaacaccctgatgtgcagatcatcgtaaccgacgacggtttacagcattaccgtctggcgcgtgatgtggaaattgtcgttattgatggtgtgcgtcgctttggcaatggctggtggttgccggcggggccaatgcgtgagcgagcggggcgcttaaagtcggttgatgcggtaatcgtcaacggcggtgtccctcgcagcggtgaaatccccatgcatctgctgccgggtcaggcggtgaatttacgtaccggtacgcgttgtgacgttgctcagcttgaacatgtagtggcgatggcggggattgggcatccgccgcgcttttttgccacgctgaagatgtgtggcgtacaaccggaaaaatgtgtaccgctggccgatcatcagtctttgaaccatgcggatgtcagtgcgttggtaagcgccgggcaaacgctggtaatgactgaaaaagatgcggtgaaatgccgggcctttgcagaagaaaattggtggtatttgcctgtagacgcacagctttcaggtgatgaaccagcgaaactgcttacgcaactaaccttgctggcttctggcaactagttacgccgcggcagcgttcgattgatggagtcatgaatgtcgctgccgcacctctcccttgctgatgcgcgtaatcttcaccttgccgcacaaggcctgttaaacaaaccccgccgtcgagcgtcgttggaggatattccggcaacgatctcccgcatgtccttgctgcaaatcgataccatcaatattgttgcccgtagtccatatctggtgcttttcagtcgtctgggaaattatcctgcccagtggctggatgagtctctggcgcgtggcgaattaatggaatactgggcgcatgaagcctgctttatgccgcgtagcgactttcgtcttattcgccaccgcatgctggcacctgaaaaaatgggctggaaatacaaagacgcctggatgcaggaacatgaggcggaaattgcacagttaattcagcatattcatgataaggggccggtacgttcagccgattttgagcatcctcgtaaaggtgcaagcggctggtgggaatggaagccgcataaacggcatctggaaggtttatttactgccggaaaggtgatggtgattgaacggcgcaacttccagcgcgtttatgatttaacccaccgtgtcatgcctgactgggatgatgagcgcgatctcgtttcgcaaacagaagcagaaatcatcatgctggataacagtgcgcgtagcctgggaatattccgcgaacagtggctggcagattactatcggctgaaacgtccggcactggcggcgtggcgcgaagcgagggctgaacagcagcaaatcattgctgtgcatgttgaaaaattgggcaatctttggctgcatgatgatttgctgccgctactcgagcgagcgctggccggaaagctcactgcaacgcacagcgcggtactttcgccttttgatcctgttgtctgggatcgcaaacgcgcagagcagctttttgattttagctaccggctggagtgctataccccagcgccgaaacgccagtatggctattttgttctgccgttattacatcgtgggcaattagttgggcgaatggatgccaaaatgcatcgccagacaggcatccttgaagttatctctctgtggttacaggaaggtattaaaccaacgacaacgctgcaaaaagggctacgtcaggcgattactgatttcgctaactggcagcaggcaacgcgggtgacattaggatgctgcccgcaaggcctctttactgattgccgcaccggctgggaaatagaccccgtcgcataaatgattatgataagatttatgcattcataacccgatccatctggaggaactatggatcatcgtctgcttgaaatcattgcctgcccggtttgcaacggaaaactttggtataaccaggaaaaacaagagcttatttgcaaactggacaacctcgctttcccgctgcgtgatggcattccagtgttgctggaaacggaagcccgcgtgctgactgctgatgagagtaaatcatgagttttgtggtcattattcccgcgcgctacgcgtccacgcgtctgcccggtaaaccattggttgatattaacggcaaacccatgattgttcatgttcttgaacgcgcgcgtgaatcaggtgccgagcgcatcatcgtggcaaccgatcatgaggatgttgcccgcgccgttgaagccgctggcggtgaagtatgtatgacgcgcgccgatcatcagtcaggaacagaacgtctggcggaagttgtcgaaaaatgcgcattcagcgacgacacggtgatcgttaatgtgcagggtgatgaaccgatgatccctgcgacaatcattcgtcaggttgctgataacctcgctcagcgtcaggtgggtatggcgactctggcggtgccaatccacaatgcggaagaagcgtttaacccgaatgcggtgaaagtggttctcgacgctgaagggtatgcactgtacttctctcgcgccaccattccttgggatcgtgatcgttttgcagaaggccttgaaaccgttggcgataacttcctgcgtcatcttggtatttatggctaccgtgcaggctttatccgtcgttacgtcaactggcagccaagtccgttagaacacatcgaaatgttagagcagcttcgtgttctgtggtacggcgaaaaaatccatgttgctgttgctcaggaagttcctggcacaggtgtggatacccctgaagatcttgagcgcgttcgcgctgaaatgcgctaatttcacttcacgacacttcagccaattttgggaggagtgtcgtaccgttacgattttcctcaatttttcttttcaacaattgatctcattcaggtgacatcttttatattggcgctcattatgaaagcagtagcttttatgagggtaatctgaatggaacagctgcgtgccgaattaagccatttactgggcgaaaaactcagtcgtattgagtgcgtcaatgaaaaagcggatacggcgttgtgggctttgtatgacagccagggaaacccaatgccgttaatggcaagaagctttagtacgcccggaaaagcccgacaactggcatggaaaaccaccatgctggcaagaagtgggactgtccgtatgccgactatttatggtgtgatgacgcatgaagaacaccccggccccgatgtcctgctactggagcggatgcgtggtgtttcggtggaggcaccagcccgaacaccagaacgctgggaacaactcaaagaccaaatcgttgaagccttactggcctggcaccgtcaggacagtcgcggttgcgtcggcgcggtcgacaatactcaggaaaatttctggccctcatggtaccggcaacatgttgaagtgctatggaccacgctcaatcagttcaataacaccggtctgacgatgcaggataagcggatcctgtttcgcactcgcgaatgtctcccggcattatttgaaggctttaacgacaattgtgtgctgattcacggtaacttctgtttacgcagcatgttgaaagattcgcgcagcgatcagttactggcgatggtcgggccgggactaatgctttgggcaccgcgagaatacgaactgttccgactaatggataattctctggcggaagatttgctctggagttacctgcaacgcgcgccagtggcggagtcgttcatctggcggcgttggttgtatgtgttatgggatgaagttgcgcaactggttaataccggacgatttagtcggcgcaacttcgatctggcatcaaaatcactcttgccgtggctcgcctgacgaaccttttagctactgccagatacggccaagcgtttcatagccaacacgatcgctatgcatcaaccagaccggagaagggattgcccgttcccacgggttaagcggcgagtcgatggccaactgattcgccggggctggtagcggatttaacccttcctgctgaaaaaagatcatcgcccgcggcagatgtgatgcggaggtcaccagcaggaaaggggcgtcaccaatcgcctgtttcactgctgcagcttcttcttcggtatcttttggcaaatccagggtgataatttgctcgcgcggcacgcccagcgattgcgcaactctggcacctacttccgctgtactcaccgtattggtttttgctacgcctcccgtgaagatcagttttgatcccggattttcgcgccataagcgaataccttcattcaggcgtggcagactgttattgattaaattagagctcggtgcccactgcgggttccaggtataaccacctccgagcaccacgatatagtccactttttgcgaattattccatgtcggataggtgctttcgatgggacgcagcaggcggtcggctaccggttgcaaactcaataacaagagcgccagccacccaatgctaataaaaatcttcccggttttttgaaaacggctaaaccacagcagcgccaggccagcgccaataatcaacaacatcagcggaagtggcagcaacatattgccaatcacttttttcagtgtaaaaagcatcctttctggttccttttttaaccatatagcaagggatcgccagcgatattacaccagacgggttcattctcgccgtggctgtgacaaaatagcgtctttatcagaaaacgtcttagccaaccggtggagaaagcaatgcaggatcgcaattttgatgatattgcggaaaagttttcccgtaacatttacggcaccaccaaagggcagcttcgacaggctattctgtggcaggatctcgatcgcgtgctggcggaaatgggcccgcaaaaactgcgtgtgctggatgctggcggtggagaagggcagaccgcaatcaaaatggccgagcgtgggcatcaggtcattttatgcgatctttctgcgcagatgatcgaccgcgcaaaacaggcggcagaagcaaaaggtgtgagcgacaacatgcaatttatacattgcgccgctcaggatgttgcttcgcatttggaaacgcccgttgatctgatattgttccatgcggtgctcgagtgggtggctgatccccgcagcgtattgcagaccctgtggtcagtgttgcgtccaggcggcgtgttgtcgttaatgttctacaatgcgcatggtttgttgatgcataacatggtcgccgggaattttgattacgtgcaggcgggaatgccgaaaaagaaaaaacggacgctttcgccagattatccacgcgacccggcgcaggtttatctgtggctggaagaagctggttggcaaattatgggtaagacaggcgttcgcgtgtttcatgattatctgcgcgagaaacaccagcagcgcgactgctatgaagcattacttgaattagaaacgcgttattgccgtcaggaaccgtatattaccctggggcgttatattcatgtcaccgcgcgcaaaccgcagagcaaggataaagtatgagtgaattttcccagacagtccccgaactggttgcctgggccagaaaaaatgacttctccatctcgctgccggtagaccgactctcttttctgctggcggttgccacgctgaacggcgagcgtctggatggtgagatgagtgaaggcgagctggtggatgcattccgccatgtgagtgatgcgtttgagcaaaccagcgaaaccatcggcgtgcgcgccaataacgcgatcaacgacatggtgcgtcaacgtctgctgaaccgctttaccagcgagcaggcggaagggaacgcaatttaccgtctgacgccgctcggcatcggcattactgactactacatccgtcagcgcgagttttctacgctgcgtctttctatgcagttgtcgattgtggcgggtgagctcaaacgcgcagcagatgccgccgaagagggcggtgatgaatttcactggcaccgtaatgtctatgcgccactgaaatattcggtagcagaaattttcgacagtatcgacctgacgcaacgtctgatggacgaacagcagcagcaggtgaaggacgatatcgcccagttgctgaacaaagactggcgggcggcgatttccagctgtgaattgttgctttcggaaacttccggaacgctgcgtgaattgcaggatacgctggaagcggcaggcgacaaattgcaggctaatctgttgcgcattcaggatgcgacgatgacccatgacgatctgcatttcgtcgatcgtctggtgttcgatctgcagagcaaactcgatcgtattatcagttggggccagcaatccatcgacttgtggattggctacgaccgccacgtacacaaatttattcgtaccgcgatcgatatggataaaaaccgcgtctttgctcagcggttacgtcagtcggtacaaacctattttgatgagccgtgggcgctaacttatgccaatgccgatcgtctgctggatatgcgtgacgaagagatggcactgcgcgatgaagaagtgactggggaacttcctgaggatctggaatacgaagagtttaacgagatccgcgaacagctggcggcgatcatcgaagaacaacttgccgtgtacaaaaccagacaagtgccgctggatcttggtctggtggtacgcgaatatttgtcacagtatccgcgtgcacgtcactttgacgttgcgcgtattgttattgatcaggcggtacgtcttggcgtagcgcaagcagatttcaccggactgccagcgaaatggcagccgattaatgattacggagccaaggtacaggcgcatgtcatcgacaaatattgaacaagtgatgccggttaagctggcgcaggcgctggcgaatccgttatttccggcgctggacagcgccttacgttcaggacgccatattggcctcgacgaactggataatcatgcattcctgatggattttcaggaatatctggaagagttttacgcgcgttataacgttgagcttattcgcgcaccggaagggttcttctatttacgcccacgttccaccactcttatcccgcgttccgtcttgtcggaactggatatgatggtcgggaaaatcctctgttatctctatctcagcccggaacggctggcgaatgaggggattttcacccagcaggaactgtacgacgaactgctcaccctggccgatgaagcaaaactgctgaaactggtgaacaaccgttcaaccggttcagacgttgaccgtcagaagttgcaggagaaagtacgttcttcgctcaaccgtctgcgtcgtttaggcatggtgtggtttatgggccacgacagcagcaagttccgcattaccgaatcggtgttccgcttcggagccgatgtgcgtgctggcgacgatccccgtgaagcacagcgtcgcctgattcgtgatggcgaagcaatgccgattgaaaatcatctgcaactcaacgatgaaaccgaagagagccagccagatagcggagaggaagaataatgattgaacgcggtaaatttcgctcactgacgctgattaactggaacggcttttttgcccgaacttttgaccttgacgagctggtcacgacgctttccggcggtaacggggcgggtaaatccaccacgatggcggcgttcgttacggcgctgatccccgacctgaccctgctgcatttccgtaacactacggaagccggggccaccagcggttcgcgcgataaaggtctgcacggtaagctgaaagcgggtgtctgttattcgatgctcgacaccattaactcgcgccaccagcgcgtggtggtcggtgtgcgtctgcaacaggttgccggacgcgatcgtaaagtggatatcaaaccatttgccattcagggactgccgatgtcggtgcagccgacacagctggtgaccgaaaccctgaacgaacgccaggcgcgcgtgctgccgcttaacgagctgaaagacaagctcgaggcgatggaaggcgtgcagtttaaacagttcaactccattaccgattaccactcgctgatgttcgatctgggcatcatcgcgcgtcgtctgcgctccgcatctgaccgtagcaaattctatcgtctgatcgaagcttcgctgtatggcgggatctccagtgccattacccgttctctgcgcgactacctgttgccggaaaacagcggcgtgcgtaaagcgttccaggacatggaagcggcgctgcgtgaaaaccgcatgacgctggaagcgattcgtgtcacccagtcggaccgtgacctgtttaagcatctgatcagcgaagctaccaactacgtggcggcggactacatgcgtcacgccaacgagcgccgtgtccatctcgacaaagccctggagtttcgtcgcgagttacatacttcgcgtcagcaactggcggctgagcagtacaaacacgtcgatatggcgcgtgagctggcagagcacaacggtgccgaaggcgatctggaagcggattatcaggcggccagcgatcacctgaacctggtgcaaaccgcactgcgtcagcaggagaagatcgaacgctacgaagcggatctcgatgagctgcagatccgtctggaagagcaaaacgaagtggtggcagaagccatcgaacgccaggaagagaacgaggctcgcgcggaagctgccgaactggaagtggacgagctgaaaagccagcttgctgactaccagcaggcgctggacgtccagcaaacgcgcgcgatccagtataaccaggcgattgctgcacttaatcgtgccaaagaactgtgccatctgccggacttaaccgccgacagcgccgccgaatggctggaaaccttccaggcgaaagagctggaagcgactgaaaaaatgctctctcttgagcagaaaatgagcatggcgcaaaccgcgcacagccagtttgagcaggcttatcagctggtggtggcaatcaacggcccactggcgcgtaacgaggcgtgggatgtcgctcgcgaactattgcgcgaaggggtcgatcagcgtcacctggcagagcaggttcagccgctgcggatgcgattaagcgaactggaacagcgtctacgcgagcagcaagaagctgagcgtctgctggcagatttctgcaaacgtcagggcaagaattttgatatcgacgaactggaagccctgcatcaggaactggaagcacgcattgcctctctttccgatagcgtgtctaacgcccgtgaagagcgcatggcactgcgccaggagcaggaacagctgcagtctcgcattcagagtttgatgcagcgtgcgccggtttggctggcagcgcaaaacagtctcaaccagttgagcgaacagtgcggcgaagagtttacctccagccaggacgtcaccgaatatctgcaacagttgctggagcgtgagcgagaggcgattgttgaacgcgatgaagtgggcgcgcgcaaaaacgccgtcgatgaagagatcgaacgtttaagccagcctggcggctctgaagatcagcgtctgaacgcgctggcggagcgttttggtggtgtgctgctgtcagaaatttatgacgacgttagcctggaagatgcgccgtacttctcagcgctgtatggcccgtcacgccacgccatcgtggtgccagatctgtcacaggtaactgaacacctggaaggcttgaccgattgcccggaagatctctatctgatcgaaggagatccgcagtcattcgatgacagcgtgttcagcgttgatgagctggaaaaagcggtagtggtgaaaatcgccgatcgtcagtggcgttattcacgtttcccggaagtgccgctgtttggtcgtgctgcgcgtgaaagccgtattgaaagcctccatgccgagcgtgaagtgctttccgaacgcttcgccacgctctcctttgatgtacagaaaactcagcgtctgcatcaggcgttcagccgctttatcggcagtcatctggcggttgcgtttgagtctgacccggaagcagaaatccgtcaactgaacagccgtcgcgtcgaactggagcgggcgttaagtaatcatgaaaatgataaccagcagcagcgtattcagtttgagcaggcgaaagagggcgttacggcgctgaaccgcattctgccgcgtctcaacctgttggctgatgacagcctggcggatcgcgtcgatgaaatccgcgaacgtctggatgaagcccaggaagccgcgcgttttgttcagcagtttggcaatcaactggcgaaactggaaccgattgtttcggtattgcagagcgacccggaacagttcgaacagttaaaagaagattacgcgtactctcagcagatgcagcgcgatgcccgtcagcaggcgtttgccctgacggaagtggtgcagcgtcgtgcgcactttagctattctgactcggcagaaatgcttagcggtaacagcgatctcaacgaaaaactgcgtgaacgtctggaacaggcggaagcggagcgtacccgcgctcgcgaagcgttgcgcggtcacgcagcgcagttgagtcagtacaaccaggtgctggcttcgctgaaaagttcttacgacaccaaaaaagagctactcaacgatctgcaacgtgaattgcaggatatcggcgtgcgtgctgatagcggggcagaagagcgggcgcgtattcgccgtgacgagctgcatgcgcaactgagcaataaccgttcacgccgcaatcaactggaaaaagcgcttaccttctgcgaagcggagatggacaacctgacccgcaaactgcgcaagctggagcgggattactttgagatgcgcgagcaggtagtgaccgccaaagcgggctggtgtgcggtgatgcgcatggtgaaagataacggcgttgagcgccgcttacaccgtcgtgagctggcttatctctccgctgatgatttgcgttccatgtcggataaggcgttaggtgcgctgcgtctggcggtggcggataacgaacatctgcgcgacgtgctgcgcatgtcggaagatccgaaacgtccggagcgtaaaattcagttcttcgtggcggtttatcagcatctgcgtgaacgtattcgtcaggatattattcgtaccgatgatccggtggaagctatcgaacagatggagattgaacttagccgtctgaccgaagaattaacctcccgtgaacagaaactggcgatcagttcccgcagcgtggcgaacatcattcgcaaaaccattcagcgcgagcagaaccgtatccgtatgctcaaccaggggttgcagaacgtatcgtttggtcaggtgaacagcgtgcgtctcaacgtgaacgtgcgtgaaacgcacgccatgctactggatgtgctctctgaacagcacgagcagcatcaggatctgtttaacagcaaccgtttgaccttctcggaagcgctggcgaaactgtatcaacgtcttaacccgcagattgatatggggcagcgcacgccgcagaccatcggtgaagaactgctggattaccgcaactatctggaaatggaagttgaggttaaccgtggttccgatggctggctgcgcgcagagtctggtgcattgtcgaccggtgaggcgattggtaccggtatgtcgattctggtgatggtggtacaaagctgggaagatgaatctcgccgcctgcgcggtaaagatatctctccttgccgcctgctgttcctcgatgaagcagcgcgactggatgctcgttctatcgccacgctgtttgaattgtgtgagcgtttgcaaatgcaactcatcatcgcagcgccggaaaatatcagcccggagaaaggcaccacctataaactggtgcgtaaagtcttccagaataccgaacacgttcatgtcgtcggcctgcgaggatttgcgccgcaactccctgaaacgcttccaggaactgacgaagcgccttctcaggcgagttaaaattaaggcggcagcaatgccgccttttctttttccgaaaactccgtttctgcactaaaaaagtggcacattacggcgcgcttttctttaaacttctttacattaggttatgtaaaaacgtatcggcgtttatatactgaagataagcctgatgagtaacaggcttgctcgtcatactttcgtgagtattggcgttgtacaggcaagtcgtaaaataacagcctggctattcagagtatgataaaaacagggggcaagggatgttgcttaatatgatgtgtggtcgtcggctgtcggcaatcagtttgtgcctggccgtaacattcgctccactgttcaatgcgcaggccgatgagcctgaagtaatccctggcgacagcccggtggctgtcagtgaacagggcgaggcactgccgcaggcgcaagccacggcaataatggcggggatccagccattgcctgaaggtgcggcagaaaaagcccgcacgcaaatcgaatctcaattacccgcaggttacaagccggtttatcttaaccagcttcaactgttgtatgccgcacgcgatatgcaacccatgtgggaaaaccgtgatgctgttaaagccttccagcaacagctggcagaggtggcgattgccggtttccagccgcagtttaataaatgggtagagttactgaccgatcctggtgttaacgggatggcacgcgacgtggtgctctctgatgcgatgatgggctatctccatttcattgcaaatattccggtcaaaggcactcgctggctatatagcagtaaaccttatgcacttgcaacgccgccgctctcggtgattaaccaatggcagctggcgctggataaaggtcaattgcctacgtttgttgcaggactggcaccgcagcatccgcaatatgcggcgatgcatgaatcgttactggccttactctgtgacaccaaaccgtggccccaactgaccggcaaagcaacgttgcgcccagggcagtggagtaacgacgtaccggcgttgcgcgaaatattgcaacgcacaggcatgttggacggggggccgaaaattactctacctggcgatgacacgccaactgacgcggtagtcagcccatccgctgttactgttgaaacagcagaaactaagccgatggataagcaaacgacgtctcgtagtaaacctgcgcctgccgttcgcgccgcctacgataatgaactggtggaagccgttaaacgttttcaggcatggcaaggattgggggcagatggtgctattggcccggcaacacgtgactggttaaacgtaacgcccgcccagcgtgctggcgtgttggctctcaacatccagcgattgcgcttgctgccaacagagctttctaccgggatcatggttaacattccggcctattcgctggtctactatcagaacggcaatcaggtgctggattcgcgagtcattgtcggtcgccccgatcgcaaaacgccgatgatgagcagtgcccttaacaacgtagtggtaaacccgccgtggaacgtacctccaactctggcacgcaaagatattctgccaaaagtgcgcaacgatccgggatatctcgaaagccatggctatacggtgatgcgcggctggaacagcagagaagcgattgacccatggcaggttgactggtctacaatcacggcctcgaatttaccgttccgcttccagcaggctccaggcccacggaactcgctggggcgctataaattcaatatgccgagttcagaggccatttatttgcatgacacgccgaaccacaatctgttcaagcgtgatacacgcgcattgagctcaggctgtgtacgagtgaataaagcttccgatctggcgaatatgctgttgcaggatgcaggctggaatgacaaacgtatttctgatgcgctgaagcagggtgatacacgttacgtcaatattcggcagtcgattccggtgaatctctactacctgacggcctttgttggtgcagatggtcgtacccagtatcgtacagatatttacaattatgatctgcctgcgcgatccagctcgcaaatcgtatcgaaagcggaacaattaatcaggtaaatgaagtagttcggggaaatcagttgtcgtaataattagcatgattgggggcgattctctgcagcccccgtcactgctggggttgagtcatcttgacgtctgctttacgggcggttaaggtgcctcttgtgcgccagaagtgcatataaacgataacattgacctgtagacttgattatcatggacaaattcgacgctaatcgccgcaaattgctggcgcttggtggcgttgcactcggtgccgccatcctgccgacccctgcgtttgcaacactctctaccccacgcccgcgcattttgacactcaataatcttcataccggagagtcaatcaaagcggagtttttcgatggcagaggctatattcaggaagaattggcaaaacttaaccattttttccgcgattaccgcgcgaacaaaataaagtccatcgacccaggattattcgaccagttgtatcgcctgcaagggttgttaggcacgcgcaaaccggtgcaactcatttccggttatcgttctattgataccaacaatgaactacgcgcccgcagccgtggagtagcgaagaaaagctatcacactaaaggccaggcgatggatttccatattgaaggtatcgcgttaagcaatattcgcaaagccgcgttatctatgcgcgcaggtggtgtaggatattacccacgtagtaactttgtgcatattgataccgggccagcacggcactggtagcaatcgcttaacgaaacaggggcagtatgaactatcgtattattccggtcaccgcattctcccagaactgttcattaatctggtgtgaacaaacccgtctggccgcactggtcgatcctggcggcgatgcggaaaaaatcaaacaggaagttgatgacagcggcctgacactgatgcagatcctgctgacgcatggtcatctggaccacgttggcgcagcggcggaactggcgcaacattacggcgtgccagtttttggcccggaaaaagaagatgagttctggctgcaaggcttgcctgcgcaaagtcgtatgtttggtctggaagagtgccagccgctgacgccagatcgttggctgaacgaaggcgataccatcagcatagggaatgtgactttacaggtgttacattgccctgggcatacgccgggtcatgtagtgttttttgatgatcgggcaaagctgctgatttctggcgatgttattttcaaaggcggagtagggcgcagtgacttcccgcgtggcgatcataatcaactgatttcttcaatcaaagataaattgctgccactgggggatgacgtgacatttattccgggtcacggaccattatccacacttggttatgaacgcctgcataatcccttcctgcaagacgaaatgcccgtctggtaaggcacataaaaaagcccgcttttaatgcgggcctggatttctggcaaagtgcgctttgtttatgccggatgcggcacgagcgccttatccggcctacaaaatcgtgcaaattcaaaatattgcaggggacgcgtaggcctgataagcgtagcgcatcaggcaatgttacgtttgtcatcagtctcagcccgcttttcagcgggcttcattgtttttaatgcttacagcactgccacaatcgcttcgcacagcggagccatgttatctggtgtcatcccggccacatttacgcgaccagaagcaaccgcatatacgccaaactcttcgcgcagacgcagcacttgttcttttgtcaggccactgaaggagaacatgccgttctgtttgatgataaagctgaagtcgcggtttgcgcctttttcctgcagcgtattgacgaacaactgacgcatacgctgaatacgctggcgcatatcagtcagctcttgttcccaaatcgcacgtaacgcatcgttgctcaggatggtggcaacaacagaagcgccgtgtgctggtgggttagagtagttagcgcgaatcgccgctttcatttggctgaatgcgcgatcaacggtttcactgtcggcagcaaccagagtacaagcgccaacacgctcgttgtacaggccaaagtttttagagtaggaactggcaacaatcagctctttatgcatagccgcgaaagcgcgcagtccttcagcatcttcttccagaccacgggcaaaaccctggtaagcgaagtcaaacagcggtaaccagcctttctcaacggagagttgtgccagtgtctgccattgttccagcgtagggtcgataccggttgggttatggcagcagccatggaacagcactacgtcgccagcctgagcttcattcaggctgttaatcagtgcatcgaagtcaagagtgtgattttccgcatcataataagcgtattcacgaacttccagacctgcagagttaaagacgctcttatggttcggccagcttgggttgctcacccacactcgcttaacgctggtattttttgccaggaaatcggcagctacgcgtagtgcgccagtgccccccggagtctgtgccgtgcgagcacgtttgtcattgatcagggcgctacctttaccaaacagcagttcctgagtgcagcgaccaaattcagggatgccgtcaatgccgaggtaatttttggtggtttcattttcgagcagatactgttcagcctttttcacgctggtcagtaccggggttttgcccgtctcatctttatagacaccaatcccgaggttaattttgccgggacgttcatcggcacgaaacagatcggccaggcccagaatcgggtcggcaggagcggcggtaatgttctcaaacatgacgaggttccattatggttacagaagggaagtccgctatcagggtaacgggagatttacaaaattccaactattactgatgaaaactcaggctgtttttgcaagacgtgagattgctctggaaggtataaaaaaaacaggaccaaagtcctgttttttcggcatttaacaaagaggtgtgctattagaactggtaaacgatacccacagcaacggtgtcgtctgaacctacgcccagtttgttgtcagaatcgatctggttgatgatgtagtcaacataggtggacatgtttttgttgaagtagtaggttgcgcccacttcaaagtagttcaccagatcaacatcaccgataccttctacgtctttcgctttagatttggtgtaagcgatggacggacgcagaccgaaatcgaactggtattgcgcaactaacagaacgtcttgcgttttgttggcgaagccgctggtgtttgtaaatttattagtgatcggcgtagcgttacgggtttcaccgtagttcgctgccaggtagatgttgttcgcgtcgtacttcagaccagtagcccactgttcagcttttttaccgttgccaagaggttgagcttcttgcaggttggtacggtcagctgcaccataagcaccaacgataccaaagccttcgtattcgtagctgatagaaccgccaacaccgtcgccgttagagcggcgtgcagtgtcacgctcgtttttacccaggtactgaacagcgaagttcaggccatcaaccagaccaaagaagttggagttacgataggtagcaacgccgccaacacgaccaacgaagaagtcatcgctgtatgccgtgtcaccgccaaactcaggcagcatatcggtgtaacccagtgcatcataaaccacaccgtagttacggccgtaatcgaaagaaccaacgtcagcgtatttaagacccgcgaatgccagacgcgttttgttaccagtttgagcgtcagcgccttcagagttgttaccctggaagttatattcccactgaccataaccggtcagatcggaattgatttgagtttcccctttaaaaccaagacgggcataggtcatgtcgccattgccaccgtaactgttttcaccgttacccttggagaaataatgcagaccgacagctttaccgtacagatctactttgttgccatctttgttatagatttctgcagcgtttgcagtacctgctactaacagagcagggacgatcactgccagaatattgcgcttcatcattatttattaccctcatggttttttttatgacacctgccactgccgtcaataagttctgtcaataaaaatttacggaactattgatgagagtttggtgtctttatgtgtctgcaggcatctttccattcaaactaacgtttcgctaccgtgaaagtgctacaaagataaagatttggtttcaaaaagaaaaaatatgtaaccaaaagtaaaatttaaggaactttgtgaacaccgtcatatttccatagagacgtgatgatatttacagcaattttaatctatttatatgatttccttatatttaaattaactaaacggaaattttgtttctgatggaaactttatcgacctggcacaaaatcttctttcagacatccagaatgccaaaaaatagtatgaaaattgtgctattagctaagaaaaaactaatccgcaataagaatgcggattagtttttgcgcgtaaatgttgcaatgtaatattccgtaacaggatgatcgttatggcggggttgcaaatagattgcttgacttaacaaacagataacttgacagaaaagataaaaaaagagccagcgggcgctggctcttgaagacgctaaattagaagctggcgttacgcggagtacgtgggaacggaatcacatcacgtacgttttgcacgccagttacgtaagcaatcagacgttcaaaaccaagaccgaaacctgaatgcggaacagtaccgtagcgacgcagatcgcgataccaccagtaatcttctttattcaggcccatttccagcatacgctcgtccagcacgtccagacgttcttcacgctgggagccaccaatgatctcaccgatgcccggagccagaacgtccatagccgcaacggttttaccgtcttcgttaaggcgcatatagaacgctttaatatctttcggatagtttttaaccactaccggtgctttaaagtgttcttccgccagataacgctcatgctcagaagagagatcgactccccagtaaaccgggttttcaaacttcctgccgcagttttcgagaatggtcactgcgtcggtataatccacctgcgcaaaatcggcttcaatgaagcgttccagacgtgaaacggcatctttatctacgcgttcagcgaagaatttcatgtcgtcagcgcgttcttcgagaaccgctttgaagacatatttcagcatggcttcagccagacccgcaatatcgttcaggttagcaaacgccacttccggctccagcatccagaattccgccaggtgacggctggtgttggagttttcagcacggaaagtcgggccgaaggtataaattttggacaatgcgcaagcgtaggtttcgccgttcaactggccagatacggtcaggaaagactctttaccaaagaagtctttgtcgaaatccactttgccctgatcgttacgcggcaggttttccagatccagcgtagaaacgcggaacatttcgcctgcaccttcggtatcagatgcggtaatcagtggcgttgaaacccagaagaatccctgctcgttaaagaagcgatgcagcgcctgcgccagcgtatggcgaacgcgcgcgacggcaccaatcaggtttgtgcgcggacgcaggtgagcgacttcacgcagatactcaatgctgtggcgttttgccgccatcgggtaagtgtctggatcttcaacccaaccagcaacttcaaccttgctggcctgaatttcaaattgttgcccctggcccggcgacgccacgactttacccgtcacaatgaccgagcagccggtggtcagacgcaggacgtcttcattgtaattgggcagagaattattgatgacagcctgtacaggatcaaagcaggaaccgtcataaacggcgaggaaggagatgccagcttttgaatctcggcgggtacgtacccatccgcgcacggtgacttcgctgtcaacggctacacggccctggagtacgtcggctacaggcacaacgctcataatattctctctgttaatagtcggaaaaaataaacacttgtccacccgtaaatggggggatacctatgttacctggcatctgcaatcagacaagcagaattcgcaaatgcagcgaaagatttcggaattaaaggtaaaaaaagggagccgattagctccctgatgatattaactggcttttttaatatgcggaaggtcgaacgctttgcgcagcgcccgaacaaacgctttatcatggcagatagttttgccagggctgtcagaaagtttcgccaccggtttaccgttacactctaccaacttaatgacaatattcaggggttttacctgggggatatcgcaggtcaggcgagtcccaataccaaaacttaattgcacgcgggaagagaagtggcggtatagctcaaccgctttgcgtaaatccagattgtcagagaaaaccagcgttttactctgtggatcaattcccagcttttcataatgtgcaatggctttttcaccccattcaaccgggtcgccagagtcatgacgcaggccctgataacgactggcgaactcgacaccgaaatcacgcaggaaagcatccatagtgatgcagtcggttaatgcaatgccaagttggtcgggatactcttccagccaggcagcaagtgcagctcgctggctgttggctagatccgggctgatttgctgatgtgcctggaaccattcgtgtgcctgtgttcccatcggcgtgagggaaagccgacgcgccagatcgtagttgctggtgcccacaaaccaggattcctgttgcagacgcttaacgatggtttcttgtacttcgcgagaaaaacggcgacgggtgccaaaatccatcagatggaagcgcgacatatcaagaccggcggttaacgccgagaagtcgactaatttgctttccagcgtgtcgagggcttgcgcaacgtcggcctgcggtgagcgatagcgatgtaccatttcactgataaccgccagcaaaggaacttcccagaggatgacttcacgccacgggccgcttaaacgaatatccagcttgccattatcgttggacacggtgacttgttccgggttaaagcggaactcgcgtaaccagttaagatagtcggccttaaagaaaggcagggcagaaagccactgatattcatcatcctgcaggcgcaggtgctgcatcgcctgaacctgttcacgaatagcatcggcataaatacccagcagatcgtcacctcggcaacgaaactccgccgcgacatgcacatcgtaatagtgatgaaacacggcttgctgcatatgcaacttataagcatctgtatccagcaacgagtgcagaacaggagaagcgaattgtgtcataggtgcgcagtagcgtcctcgtacaggagcgtttagtacaataaacatcttcaggaactgctggagtataccttgtttcgcaatttattgaaccccgatcacaccatatgccacctttctggtcgatggcattacgcggtgtatgttataaaaatgtagcaataaaggcgtttgtacctgaaaagatgaagattctgcatagcgcgatttacgcaacaggaatagactgaacaccagactctataaaagatgctaaaggttatttatgactcaacagccacaagccaaataccgtcacgattatcgtgcgccggattaccagattactgatattgacttgacctttgacctcgacgcgcaaaagacggtcgttaccgcggtcagccaggctgtccgtcatggtgcatcagatgctccccttcgtctcaacggcgaagacctcaaactggtttctgttcatattaatgatgagccgtggaccgcctggaaagaagaagagggcgcactggttatcagtaatttgccggagcgttttacgcttaagatcattaatgaaataagcccggcggcgaataccgcgctggaagggctttatcagtcaggcgatgcgctttgcacccagtgtgaagccgaaggtttccgccatattacgtattatctcgaccgcccggacgtgctggcgcgttttaccaccaaaattattgccgataaaatcaaatatcccttcctgctttccaatggtaaccgcgttgcgcaaggcgaactggaaaacggacgccattgggtacagtggcaggacccgttcccgaaaccgtgctacctgtttgcgctggtggcaggcgactttgatgtactgcgcgatacctttaccacgcgttctggtcgcgaagtagcactggagctgtacgtcgatcgcggcaaccttgatcgcgcgccgtgggcgatgacctcgctgaaaaactccatgaaatgggatgaagaacgctttggcctggagtatgacctcgacatctatatgatcgtcgcggtggatttcttcaatatgggcgcaatggagaataaggggctgaatatctttaactccaaatatgtgctggcccgcaccgacaccgccaccgacaaagattacctcgatattgaacgcgttatcggccatgaatatttccataactggaccggtaaccgagtgacctgtcgcgactggttccagctcagcctgaaagaaggtttaaccgtcttccgcgatcaggagttcagctctgaccttggttcccgcgcagttaaccgcatcaataatgtacgcaccatgcgcggattgcagtttgcagaagacgccagcccgatggcgcacccgatccgcccggatatggtcattgagatgaacaacttctacaccctgaccgtttacgagaagggcgcggaagtgattcgcatgatccacaccctgcttggcgaagaaaacttccagaaagggatgcagctttatttcgagcgtcatgatggtagtgcagcgacctgtgacgactttgtgcaggcgatggaagatgcgtcgaatgtcgatctctcccatttccgccgttggtacagccagtccggtacaccgattgtgaccgtcaaagacgactacaatccggaaaccgagcagtacaccctgaccatcagccagcgcacgccagccacgccggatcaggcagaaaaacagccgctgcatattccgtttgccatcgaactgtatgataacgaaggcaaagtgatcccgttgcagaaaggcggtcatccggtgaattccgtgctgaacgtcactcaggcggaacagacctttgtctttgataatgtctacttccagccggtgcctgcgctgctgtgcgaattctctgcgccagtgaaactggaatataagtggagcgatcagcaactgaccttcctgatgcgtcatgcgcgtaatgatttctcccgctgggatgcggcgcaaagtttgctggcaacctacatcaagctgaacgtcgcgcgtcatcagcaaggtcagccgctgtctctgccggtgcatgtggctgatgctttccgcgcggtactgcttgatgagaagattgatccagcgctggcggcagaaatcctgacgctgccttctgtcaatgaaatggctgaattgttcgatatcatcgacccgattgctattgccgaagtacgcgaagcactcactcgtactctggcgactgaactggcggatgagctactggctatttacaacgcgaattaccagagcgagtaccgtgttgagcatgaagatattgcaaaacgcactctgcgtaatgcctgcctgcgtttcctcgcttttggtgaaacgcatctggctgatgtgctggtgagcaagcagttccacgaagcaaacaatatgactgatgcgctggcggcgctttctgcggcggttgccgcacagctgccttgccgtgacgcgctgatgcaggagtacgacgacaagtggcatcagaacggtctggtgatggataaatggtttatcctgcaagccaccagcccggcggcgaatgtgctggagacggtgcgcggcctgttgcagcatcgctcatttaccatgagcaacccgaaccgtattcgttcgttgattggcgcgtttgcgggcagcaatccggcagcgttccatgccgaagatggcagcggttacctgttcctggtggaaatgcttaccgacctcaacagccgtaacccgcaggtggcttcacgtctgattgaaccgctgattcgcctgaaacgttacgatgccaaacgtcaggagaaaatgcgcgcggcgctggaacagttgaaagggctggaaaatctctctggcgatctgtacgagaagataactaaagcactggcttgataaataaccgaatggcggcaatagcgccgccattcggggaatttacccctgttttctcaggcgagtttcagattcaccacgttgcatcacccgttgcaacacctccgcttccagctccgctaatcgcaccgaccctaatcgacgcggacgggggatatccactgtcaaatccagaccaatttttccctcttcaattaacagcacccggtcagccatcgctaccgcttcgctcacatcatgcgtcaccaacagtacggtaaagccgtgctcctgccaaagtgacacaatcaaatcctgcatctcgagtcgcgttaaggcgtccagcgccccgagcggttcatcaagcaacaataatcccggtcgatgaatcaacgctcttgccagcgccactcgctgtttctgcccgccagaaagtgcggcaggccattcccctgcgcgattctccagtcctaccgcagccaacgctcgacgtgcggcatcgcgccactggcctttaaggcctaacccaacgttatcaatcaccgatttccacggtagcagacgcgcatcctgaaacatcattcgcgtgtcttcctgaatttcaggcagcggtgtggtgcccgctaacacatcgcctgcggttggcgtttccagacctgccagcaggcgcagcagggtacttttgccaccaccgctgcggcccaccaccgccacaaactgacctgccggaatatgtaaatccagttggttcaggacgatattttccgcgtaatgtttgcttactgcattgagcaacaatggcgtgccctggttcagacgagcagtattcataccgtggcctccttcaaatgataagccgggttccagcgcaaccagaggcgctctaacagctgcgcgctgacgtcagccagtttgccgagcagggcgtaaagaataatagcgactaccaccacgtccgtttgcaaaaactcccgcgcattcatcgccagataaccaatgcctgaattggcagaaatggtttcggcaacaatcagcgtcagccacatcaggcccaacgcaaaacgcacgccgaccataattgagggcagggcaccaggcaggatcacatggataaacagcggtatgccggataatccatagctacgcgccatctccaccaacccgcgatcgatattacggatgccatgccaggtgttgatataaatggggaatagcgtaccgagcgccaccagaaagatttttgcggattcatcaatgccaaaccacaaaatcaccagcgggatcagcgccagatgcggcacgttgcgcaacatctgaattgaggtatccagcagccgttctccccagcgagatagcccgctaatcagtcccaaaatcaaccccagcgatccgccaattgaaaagccaatcagcgcccgccaggagctgatcgccagatgctgccacagttcgccgctggcggagagcgtccagaacgccgtcaccactccttccggtgaaggcaaaatacgcgtcgacagccagccaaccgaggaggccagttgccacaccgccacgatgcccaccggtaaaaaccagggggcaacgcgcaataaccacttcttcactggcgttgccattatttcttccttagctttgcgcgactttacgggggataaaatcattcgccaccgcttcgccttgcggattcagcggctgcggctggggaatttccgggatggcgacatccagaagcgggaacagcaactcgccaacccgatacgcttcttccagatgcggatagcccgaaagcacaaaactgtcgatgccaagcgcggcatattcgttgattcgcgcagcgaccgtaggaccatcgcccaccagcgccgtcccggcaccgccgcgcactaagccaacgcccgcccataaattggggctgatctccagattgtcgcgcttgccgttatgtaacgccgccattcgctgttgccctacggaatccgtccgggcgaatgcggcctgtgctttggcgatagtttcatcatcaagatgcgagattaaccgctcggcggcctgccacgcttcgtcgttagtttcacgaacaatcacatgcagacgaataccgaaacgaattttgcgtccatgcgcggcagctttcgcccgcacttgttcgattttctctttaaccagttccggcggttcgccccaggtgaggtagagatcaacctgttctgccgccagctcctgggcgacatctgacgatccgccaaagtaaagtggcggatacggctgttgaatcgccgggaagagcagttttgctccgcgcacatgaatatgtttaccgttgaaatcgacggtttctctctgcaataaacgccgccagacctgggtaaattccgccgaggcttcgtagcgctcgctatgatcaaggaacactccgtcgcctgccagctcttgtggatcgctgcctgtgaccaggttaaacaacgcacgtccatttgagagacggtcaagcgtggcggcctggcgggcggcaacggtaggtgaggttacgctgggacgcagggcgacaagaaacttcagccgctgcgtcaccgggatcatcgatgcggcaaccagccacgcatcttcgcaggagcgccccgttggaattagcacaccggtatagccaagacgatccgccgcttgcgcaatttgttgcagataaccgtgatcaaccgggcgtgaaccttcttccgttcccagataatgcccgtcaccgtgggtcggtaaaaaccagaacatattcagactcataattgttttccttccagttgagtgggctgccagatgcgctggcgaatatcgacttttttcggcaccagacgattttcataaaacagatctgccgtttgctgctgtaaggcggcaacctcggcgttaaccggtttgatggtggtaggagggcgatgatcttagtaagaggcaatcaccggtgccggtaagcccatcgtttttgccagtaaagcgatgctttgctcgcgctggctgcgggttaacgcatcggcctcactaaaggttgccagtacgccctgaataaaagcgccgtttttttctgcatagggacgagctgccagataaaacgatccagtttgattgagatcggtgccgtctttcagcacccgcacgccgccctgtaataatgcagcagagtagtagggatcccagatagcccaggcgtcaacgttaccttgctggaacgcggcgcgggcatcagcgggcgtcaggtaagtgggttggatatcggtaaacttaagtccggcctgacgcagtgcacgcagtaaaaggttgtgtgaactggaacctttctgaaaggcaactttgtgacctttaagatcggctacggttttgatcgggctgttttctgccaccagaatcacttcggctttgggcttcggtggctcgacgcccacatataccaaatcagccccggcagcctgggcaaagattggcggaatatccccggtactgccgagatcaatactgccaacgtttaacgcttccaacatttgcggacccgcggggaactccacccaggagatttttgattgcggatagcgtttttccagtaactggtggctttttgccagtaccataccaatactgcctttctgatagcctatacgtaacgcttcaggcgaggattctgcagcaaccgcaatcgtagagacgctaagcaatcccaccagcgccagtttaatgatgttacgcatgggcattacctcgcagagacagaaggtcaggaacctgaacatcgcggcggtgcaatgcctgccagaaagtttctagcgcggtatcaagacgggtttgcagatttggcgtgaactggggtctgtgatggtaatcaattacttgtgagtcatcggcaaacacgccgtgcaggatctcctgagctttcagtgcgcttaaaactggtttaagggcataatcgaccgccagcagatgggccacggtaccgcccgtcgccagcggtagcaccactttgccttgcaaagcgcgctctggcagcaggtcgagcagggttttcagcgcgccggaataggcggctttatacacaggtgtagcgactatcagtccatcagcctgttgcagctgttcggtgaaggtcttgagtgccggactatcgaaacgagcataaagcagatcttccggggcgaagttttgcagattccagtgataaacctctacatccaggccatttagtttttcccgcgcatattccagcaaggagctggagcgagaaggaaagcgaggactacccgccagggtgatgacacgcatactctctccttataaccaattgttctttttttgttaacattgataacaattcggtcagtctgtcggagagacaagaaaatgccaaatataaattttgtgtatctttttctgaaaataaactaaagaaagggctttatatatcacgcatatttatttgttggatagtcattagatgttgaatcaatgaattactcgttcagttaatatttaaatattcatgaaatctataaattaaagatttgtcacttattggatttagtatgcttgatttaaatggcggacaattattgttattattaagtctaatgtcatttaaaggcattatcatatttacgaagagatcaggatgataacgatgaaaaaaagtgtattgacggcgtttataactgtggtatgtgtaacgtccagcgttatggctgctgatgataatgctatcacggatggctcagtaacatttaatggtaaagttattgctccagcttgtaccctggtagctgcgacgaaagattccgtggtgactttgccagatgttagtgccacgaagttgcaaaccaatggtcaggtttctggcgtgcaaactgatgtgccaattgaattaaaagattgtgatactaccgtaacaaaaaatgcaacgttcacctttaatggcactgcggatactactcagattacagcgtttgctaaccaggcctcatctgatgctgctacaaacgtggccctgcaaatgtatatgaatgatggtacaacggccatcacgccagacacagaaaccgggaacattttgttgcaggatggagatcagacgttgacttttaaagttgattatatcgctacggggaaagcgacttcaggtaatgtgaatgcggtaacaaatttccatattaactattattaatagaactcattaattgttttattaattagtacccctccagtgttctggaggggatattcatattttttaagagtgactatttatgaaaacttgcataacaaagggaattgtgaccgtaagtttaacggcaatattactcagctgctcatccgcatgggcggcaggtaaaggcgggattggacttgcagcaacacgtcttgtttattcagaaggtgaagagcaaatttcactgggtgtacgtaacaccagtccggatgttccttatcttattcagtcatgggtgatgaccccagataataaaaaatcagcagactttattattacaccactgctatttgtgctgaatccggcaaatgagaatctgttacgcattatgtacattggagcgccgttggcgaaagacagagaaacccttttcttcactagcgtacgggcagtcccttcaacaacgaagcgggaagagggaaataccctgaagattgccacacaaagcgtcatcaaacttttctggcgaccaaaaggtttagcgtatcccttagccgaggctccggcgaaactgcgttgcacttcgtcagctgacatggttacggtcagtaacccaacaccttatttcattaccctgacagacctgaaaataggtggaaaggtagttaaaaatcaaatgatttccccctttgataaataccaattctctctgccaaagggtgccaaaaatagcagcgtaacgtatcgaaccatcaatgactacggggcggaaacgccgcaactcaactgtaaatcgtaattcgtcttcagttaagagagcgagatgtatagaactcaccgacaacacagcctgttaagctctggtggagtgccatcgtttattggtgggctggtggtgtttgtgtcggcagcgttcaatgcacaagctgaaacctggttcgatcctgcctttttcaaagatgatccctcaatggtggccgatttgtctcgtttcgaaaaaggacaaaaaataacgccaggggtttatcgtgtcgatattgttctgaatcagacaattgtagatacgcgcaacgtcaattttgttgagttaacgccagagaaggggattgccgcctgtttgacgactgaaagcctggatgcaatgggtgtgaatactgatgcgtttccggcttttaaacaactggacaaacaagagtgtgcgctattggcggagattattccggatgccagcgtaacttttaatgtgaataaactccgtctggaaatttcagtaccgcaaattgctataaaaagtaacgctcgtggttatgtcccccctgaacgttgggatgaagggatcaacgcgctattactgggatattcatttagcggggctaacagtattcatagcagcgcagacagtgattctggcgacagttattttctgaatttaaacagtggcgttaatttaggcccatggagattgcgcaacaattcaacatggagtcgcagtagtggccaaaccgcagaatggaagaatctcagcagctatttgcagcgggcggttattccactaaaaggcgaactgaccgtaggtgatgattatactgcaggcgattttttcgatagtgtcagctttcgtggtgtgcagctggcgtcagatgacaacatgctgccagacagcctgaaagggtttgcgcctgtggtgcgtggtatcgccaaaagcaatgcccagataacgattaagcaaaatggttacaccatttaccaaacttatgtatcgcctggtgcttttgaaattagtgatctctattccacgtcgtcgagcggtgatttgttagttgaaatcaaagaagcggacggcagcgtcaatagctacagcgtaccgttttccagcgtgccattactccagcgtcaggggcgaatcaaatacgcggtgacactggcgaaatacagaaccaatagtaatgaacagcaggagagcaaatttgcccaggccacgttgcagtggggcggaccgtggggaacgacatggtatggtggtggacaatatgctgaatattaccgtgccgccatgtttggtctgggatttaaccttggcgatttcggagcaatttcgttcgatgcgacccaggcgaagagtacgctggcagaccaaagcgaacataaaggtcagtcatatcgttttctgtatgccaaaacgctcaaccaattgggcactaattttcaattgatgggctatcgctattcgacgtcgggtttctacaccctttccgacaccatgtataaacatatggatggctacgaatttaatgacggtgatgatgaagatacgccgatgtggtcgcgttattacaatttgttttacaccaaacgtggcaaactgcaggtcaatatctcccagcaattaggcgagtacggttcgttttatttaagtggtagccagcaaacttactggcataccgatcaacaggatcggctattacagtttggctacaacacgcaaattaaagatctctcgctgggggtttcctggaactacagtaagtcccgtggtcaacctgatgctgatcaggtgtttgcactaaatttttccctgccgctcaatctgttgctccccagaagtaatgatagctataccaggaaaaaaaattacgcctggatgacctctaacaccagtatcgataacgaagggcacattacacaaaacctgggtttaacggagacactactcgatgacggtaacctgagctacagcgtgcaacagggatataacagcgaggggaaaacggctaatggtagcgccagcatggactacaaaggggcgtttgcagatgcccgagtgggctacaactacagcgataacggcagtcaacaacaactgaactacgctctttcaggcagtttagttgcccattcacagggcattaccctggggcaatcgctgggggaaactaacgttctgattgcagcaccaggcgcagagaatactcgtgtggcgaacagcaccgggctgaaaactgactggcgcggatataccgttgttccttatgccacttcttatcgggaaaatcgaatcgcacttgatgcggcgtcgttaaaacgtaacgtggatcttgaaaatgcagtagtcaacgtggttcccaccaaaggggcgttggttctggcggagttcaatgcccatacgggtgcaagggtattaatgaaaacatcaaagcagggtataccgctgcgttttggcgcgatagcgacgctggacggcgtacaggctaatagcggcataattgatgatgatggctcgctctatatggcgggtttaccggcgaagggaacaataagcgtgcgctggggcgaagctcccgatcaaatttgtcatatcaattacgagcttaccgaacaacaaattaactctgcgattacgcgaatggatgccatatgcagataatctttggagaaaaatgcgtgtcattactacgactattttttgccgccgtcttaatgctatggtgcgctcaaaccgctgcttatagcgggcagtgtcatactactcaggggaatccgtatattggcgtcaattttggcgttaaaaccctggaggaagaagcaaatacggcaggggtagttaaagacaaattttatcagtggaacgaatcgaatgattattatgtttcctgtgattgcgataaagacaatgtcagaagtggccgatgggcattcgccgcggattcaccgttagtctatttaggcgacaactggtacaaaattaatgactatcttgccgccaaagttttattgcaggttaaaggcagttctcctactgcggttcctttcgaaaacgtgggcacagggggggatacccgatggcatatttgcgaccctggcggtcaacgtttaggtgggcagggggcaagcggtaatagcggtagcttttccctgaaaatattgcagccgttcgttggctcggtcgtcattcctcctatggcgctggcgcgattatatgaatgctacaacatacccgcaggtgattcctgcacgactacaggtacaccggttttagtgtattacctgtctggtacgatcaattcacctggctcatgttccgtcaatgccggagagacaattgaagttgatttaggtgatgtcttcgctgccaatttccgtgttgtagggcataaacctcttggggccagaacagcagaacttgcaattccagtcaggtgtaacacgggaaacgcgggattagttaatgtcaacctgagtctgacggcaaccacagaccccagctatccccaggcgattaagacgtcacgtcctggcgtgggcgtggtggtgaccgatagccagaacaacattatttcccctgctggtggaacattaccgctctctattcctgatgatgcagacagtatcgcgcgaatgaatgtctatccagtcagcacgacaggtgtaccaccagaaaccgggcgatttgaagccacggcaacggtgagaataaattttgattaacgcgtgaacgtatgaagaaaaaaacgatatttcagtgcgttatcttgttctttagcattcttaacatccatgttgggatggctgggcctgaacaagttagtatgcatatttatgggaatgtggtcgatcagggctgtgatgtcgccaccaaaagtgcattacaaaatattcatattggtgattttaatatcagtgattttcaggccgcgaataccgtaagcactgctgctgatttgaatatcgatatcaccggttgtgccgctggtattactggcgcggacgtcctttttagcggcgaggctgacacccttgcgccgacactgctcaaactaactgacacaggcggaagcggtggtatggcaacggggattgccgtgcaaattcttgatgcgcaaagtcagcaagaaatcccgctcaatcaggtccagcctcttacgcccttaaaagccggggataacacactcaaatatcaacttcgttataagtccacaaaggcgggagcaacgggcggtaatgcgacggcggttctctattttgatctggtttaccagtgaaggagtgatgttgaaacggataatctggattctgttcttattgggattaacgtggggctgtgagctatttgctcatgatggcacggtcaacattagcggatcgtttcgccgtaatacatgcgtgctggcacaggatagcaagcaaatcaatgtgcagttaggcgatgtctcgctgacacgtttttctcatgggaattatggcccggagaaatctttcatcattaatttgcaggattgcggaacagatgtcagcacggttgacgtcaccttttcaggaacccccgacggagtgcagagcgaaatgttgtccattgaaagtggtacggatgcagccagcgggctggcaattgcgattctggatgatgcgaagatattgattccgcttaaccaggcgagtaaagactacagcctacatagcggtaaggtgccattaactttttatgcgcaattgcgacctgtcaatagcgatgtgcagtcgggtaaagtgaatgccagcgcgacatttgtacttcattatgactaatacgtggaacagattggcgctcttgattttcgccgttttatcgctgctggtggcgggtgaattgcaggcaggagtggtggtcggcggaacgcgatttatctttccggcagacagagaatcgatatctattttactgactaataccagtcaggaatcctggcttattaacagtaaaatcaaccgcccaacgcgttgggccgggggggaagcgtcgacagtgccagcaccattactggccgctccgccacttattctcctgaagcccggtacgacaggcacgttgcgcttgctgagaacggaaagcgacatcttgcctgtggatcgcgaaacgctatttgagttaagcattgccagcgtgccatccggcaaagttgaaaatcagagcgtaaaagtggcgatgcgctcggtatttaaactgttctggcgaccagaaggtttgccgggcgacccgctggaagcttatcaacaattacgctggacacggaattcgcagggtgtacaactcactaacccaacgccttactacattaacctgattcagttgagcgtaaatggtgaagcgttaagtaatgcgggagttgtgccgcctaaaagccagcgtcagacaagctggtgtcaggcaatcgcaccgtgtcatgtcgcctggcgggcgataaatgattacggcgggttgagtgcaaagaaggagcaaaatctgccctgaaacaggttcggaaaacgtttgcgttttttttgccgcaggtcaattcccttttggtccgaactcgcacataatacgcccccggtttgcacaccgggaatccaggagagttcatgtactaccccttcgttcgtaaagcccttttccagctcgatccagagcgcgctcatgagtttacttttcagcaattacgccgtattacaggaacgccgtttgaagcactggtgcggcagaaagtgcctgcgaaacctgttaactgcatgggcctgacgtttaaaaatccgcttggtctggcagccggtcttgataaagacggggagtgcattgacgcgttaggcgcgatgggatttggatcgatcgagatcggtaccgtcacgccacgtccacagccaggtaatgacaagccgcgtctctttcgtctggtagatgccgaaggtttgatcaaccgtatgggctttaataatcttggcgttgataacctcgtagagaacgtaaaaaaggcccattatgacggcgtcctgggtattaacatcggcaaaaataaagatacgccagtggagcagggcaaagatgactatctgatttgtatggaaaaaatctatgcctatgcgggatatatcgccatcaatatttcatcgccgaataccccaggattacgcacgctgcaatatggtgaagcgctggatgatctcttaaccgcgattaaaaataagcaaaatgatttgcaagcgatgcaccataaatatgtgccgatcgcagtgaagatcgcgccggatctttctgaagaagaattgatccaggttgccgatagtttagttcgccataatattgatggcgttattgcaaccaataccacactcgatcgttctcttgttcagggaatgaaaaattgcgatcaaaccggtggcttaagtggtcgtccgcttcagttaaaaagcaccgaaattattcgccgcttgtcactggaattaaacggtcgcttaccgatcatcggtgttggcggcatcgactcggttatcgctgcgcgtgaaaagattgctgcgggtgcctcactggtgcaaatttattctggttttatttttaaaggtccgccgctgattaaagaaatcgttacccatatctaattatttcttcgaattcctctttataagataatcagagctttattttcagccctggttgttttatattcatcgctgttgcttatttagacattttgtacttttattgttgaggttattaagcgaagcgacaatggattgtgttgctgcggttttatagggtaggggagaggcagatgcgaattaaaccagacgataactggcgttggtattacgatgaagagcacgatcgaatgatgctcgatttagccaatggtatgctatttcgctcacgttttgcgcgcaagatgttgactccagatgccttttctcccgcaggcttttgcgttgacgacgccgcgctctatttctcttttgaagaaaagtgccgcgattttaatttatctaaagaacaaaaagccgaactggtgctgaatgcactggtagcaattcgctatctcaaaccgcaaatgccgaaaagctggcattttgtttcccatggtgaaatgtgggtgcccatgccgggcgatgcggcctgcgtttggttgagcgatactcacgagcaggtcaatttgctggtcgttgaatctggcgaaaatgccgcactatgcctgctggcacaaccctgcgttgttattgcgggtcgcgcgatgcagttgggcgacgccattaaaatcatgaacgacaggctgaaaccgcaggttaatgttgacagcttcagcctcgaacaggctgtctaacgcgccaacttaagtgcagtcttcggtacacagctacagcaaagaatggtgccatcatcgcccattgctgattttttcagcggcgtgacttcgccttctaaaagctgaacacggcaacttccacaaatgcccgcgcggcaagaataagggatacgaattccctgattttctaattgctccagcaacacctgttggttatttccacgaaatgcctgtccctgccagtcaatatctacatttgcgtccggttgttgcgtgatgttggcggtatcatcagcggcagctgcgccgtaaatttttgccggagccgttgccagaatttccacctcatcgccaacgcgaatcacgccgctattacgggcaattaaattctgaccaaaatcgacatcgccgttatcctgggcagtgcggaaagattgcaatgtttttaatggttcgcctgccggatgtttttgccctttttctgggctgacggtggtgaaaatacagcggctacaaggtttaaccacatcaaacaccacatcaccaatgcgaatcactttccagctatcttcttcccaggctgacgcgccggaaaccaccagattggggcggaattgctccatttttacactggccggacaacgttgttggagatcacgtaacgtggcttcgttagcaagaaggtaaggatagccatcagcaaatgacaggggtacagtgttgtggcgtttcacgcgccgggtcatttgtggccccacccagcgtaattgcacttcgcgggagaaaaatccacttagccatttgttgatcgcgtctggcgcaattcgcgcggtaaaatgtgtgccccaaacttcggttggtgcgtcttgtgtggcgaaatcagcaaaacgaacatatgcgctactgccatctggtgcggtgagatgcaagccatcatgcacaggtgaaggagtaaaccgtaccatctggggaaactggcgagcggtaataaacgtaccgtcaggttccgtgatcataaagatgcgatcgaaggccagaccactgacatcagccagagcatgtgtaagaccaatgccgcgcatcgatttaacaggatgaataaaaagccgggttaatgtcgccacggtgcggtcctcaaatgaaaataagccctcaactttatgacatgacgcgcttattagctataatgcgcaacaattttcttagcgcctgtcccattaggctattttatttgtcagtttggccctgggttgtgctcgaaatcctcacgtacttgtgtacgctccggtttctccgcgctgtccatgtccagactgactgcaacaattacgcctactgcggtaggctcttagagtaaaagtgacgatatgaattctctgtttgccagtacggcccgtgggctggaagagctgttaaaaactgaactggaaaacctgggggccgttgaatgccaggtggttcagggtggggtccatttcaagggcgacacacggcttgtttaccagagcctgatgtggagccgcctggcctcgcgtattatgttgccgctgggcgagtgtaaggtttacagcgatttagacctctatctcggtgttcaggcgatcaactggacagagatgtttaatcctggcgcgaccttcgctgtccacttcagtggtttgaatgacaccatccgcaacagtcagtacggcgcgatgaaagtgaaagacgcgatcgtcgatgctttcacgcggaaaaatctgccgcgtccaaatgttgatcgcgatgcgccggatatccgcgttaacgtctggctgcataaagaaaccgccagtatcgctcttgatctgagtggtgatggtttacatctgcgtggctatcgcgatcgtgctggtattgcgccgatcaaagaaaccctggcagccgctattgtgatgcgatccggctggcagccaggaacaccgctgctcgatccgatgtgtggttccggtacgttgctgattgaagcggcgatgctggcgaccgatcgcgcaccaggcttgcaccgtgggcgttggggctttagcggctgggcgcagcatgatgaagctatctggcaggaagtgaaagcggaagcgcaaactcgcgcccgtaaaggcctggctgagtatagctctcatttttacggttcggacagcgacgcacgggtgattcaacgtgcacgcactaacgcccgtcttgcggggattggtgaactgatcacctttgaggtgaaagatgtcgcgcaactgaccaatccgctgccgaaagggccgtacggcacagtgttgagcaacccgccatacggggaacgtctggacagcgaaccggcgctgattgcgctgcatagcctgctgggtcggatcatgaaaaaccagtttggtggctggaatctctctttgtttagtgcctcgccggatctgctaagctgcttgcagctgcgtgcagacaaacagtacaaggcgaaaaacggcccgctggactgcgtacagaaaaattaccacgttgccgaaagcactccagacagcaaaccggcgatggtagcggaagactacgccaaccgcctgcgtaagaacctcaaaaaattcgagaagtgggctcgccaggaaggaattgaatgttaccgcctgtatgacgccgatctaccggaatataacgttgccgttgaccgttatgccgactgggtggtggtgcaggagtatgcgccgccaaaaactattgatgctcacaaagcgcgtcagcgtctgttcgatattatcgctgcaaccatttcggtactggggattgcgccaaacaaactggtgctgaaaacccgtgaacgccagaagggcaaaaatcagtaccagaaactgggcgagaagggcgagtttcttgaagttaccgaatataacgctcacttgttggtgaacctgacggattacctcgataccggtctgtttctcgatcaccgtatcgcccgtcgtatgctcggtcagatgagcaaaggcaaagatttcctcaacctgttctcttataccggcagcgccaccgtgcatgcgggattaggcggtgcacgcagcaccaccaccgtggatatgtcgcgtacttatctggagtgggcagaacgcaacctgcgtttgaatggcctgaccgggcgtgcgcatcgcctgattcaggccgattgcctggcgtggctgcgtgaggcaaatgaacagttcgatctgatctttatcgatccgccaaccttctctaactcaaaacgaatggaagatgcgtttgatgttcagcgcgatcatctggcgctgatgaaagatttgaaacgtctgctgcgtgcaggtgggacgatcatgttctcgaacaataaacgtggcttccgtatggatctcgacggcctggcaaaactgggactgaaagcacaagaaattacgcaaaaaacgctctcccaggatttcgcccgtaaccgccagatccacaactgctggctgattaccgcagcctaaaggaatagtaatgtcattaatcagtatgcatggcgcatggctgtcgttcagcgacgcgccgcttctcgataacgcagaactgcatatcgaagataacgaacgtgtttgtctggtgggccgcaacggcgcgggcaaatcgacgttaatgaaaatcctcaaccgtgaacaagggctggatgacggtcgcattatttacgagcaagatttgattgtagctcgtctgcaacaggatccgccgcgtaacgttgagggtagcgtttatgatttcgttgccgaaggcattgaagaacaagcggaatatctgaaacgctatcacgatatttcgcgcctggtgatgaacgacccgagcgagaaaaatctcaacgaactggcgaaggttcaggaacagctggatcaccacaacctgtggcagctggaaaaccgcatcaacgaagtgctggcgcaactggggttagatcctaacgttgcgctgtcgtcgctttccggcggctggttgcgtaaagcggcattaggacgcgcgctggtgagtaatccgcgcgtgctgttgcttgatgaaccgacaaaccacctggatattgaaaccatcgactggctggaagggtttttgaaaactttcaacgggacgattattttcatctcccacgaccgttcgtttatccgcaatatggcgacgcgcattgttgatctcgatcgcggcaagctggtgacctatccagggaattacgaccagtacctgctggaaaaagaagaagccctgcgcgtggaagaattacaaaatgccgagttcgatcgcaaactggcgcaggaagaggtgtggatccgccaggggatcaaagcacgccgtacccgtaatgaaggccgcgtacgcgccctgaaagcgatgcgtcgcgagcgtggtgaacgtcgcgaagtgatgggtaccgcaaagatgcaggtggaagaggccagccgctccggtaagatcgttttcgaaatggaagacgtttgctaccaggttgacggtaagcaactggtgaaagatttttcggcccaggttctacgtggcgacaaaattgccctgattggtccgaatgggtgcggcaaaaccacgctgctgaaactgatgctcggtcagcttcaagcggacagcgggcgtattcacgttggcaccaaactggaagtggcttatttcgatcagcaccgcgcggaactggatcccgataaaacggtgatggataaccttgccgaaggtaagcaagaggtgatggttaacggcaagccacgccacgtattgggctatttgcaggactttctgttccatccgaaacgggcgatgacgccggtacgtgcgctttctggcggtgagcggaaccgcttgctgctggcgcgtttgttcctcaaaccaagcaacttattgattcttgacgaaccgaccaacgatcttgatgtcgaaacgctggaactgctggaagaactgatcgacagctatcagggcacggtattgctggttagccacgatcgtcagtttgtcgataacaccgttacagaatgttggatcttcgaaggcggcggtaaaattggtcgttatgtcggcggttatcatgatgcccgtggtcagcaagagcagtatgtggcgctcaaacagcctgcggtgaaaaaaaccgaagaagccgccgcggcaaaagcagaaactgtaaaacgcagcagtagcaaactaagctataaattgcagcgcgaactggagcagctaccgcaattgctcgaagatctggaggcgaagctggaagccctacagacgcaggtggcggatgcttccttcttcagtcagccacatgagcagacacaaaaagtgctcgccgatatggctgctgcagagcaggagctggagcaagcctttgaacgctgggagtatcttgaagcgttaaaaaatggtggctgatcgcaaaatagtcgatttaaacagagacagctgacaacggtaaaattgcctgatgaactgggtttatcaggcatgaaaaccaacactttgttagtcatctgtaaaatagcgcatcattaaggagtaccaatgtgcgaacatcatcatgccgcgaagcacatcctgtgctcgcagtgtgacatgctggtggcgttaccgcgccttgagcatggtcagaaagcggcatgtccccggtgtggcacaacgttaaccgtggcgtgggatgcccctcggcagcgtcccaccgcctatgcgttggctgcactgttcatgctgttgctgtccaacttgtttccttttgtgaatatgaacgttgcaggagttaccagtgaaattacattactggaaattcccggcgtgcttttttctgaggactacgccagcctcggcacctttttcctgttgtttgtgcaactggttcccgcgttttgtctgataaccattctgttactggtgaatcgcgcggaattaccggtccgtttaaaagagcaactggcacgggtgctttttcaactcaaaacctggggaatggcggagattttcctcgctggtgtgctggtcagtttcgttaaactgatggcttacggcagcattggggtaggcagcagctttctcccctggtgtttattttgtgtcctgcaactgcgcgcttttcagtgcgttgatcgtcgctggttatgggacgacatcgccccgatgccagaactgcgccagccgctaaaaccaggcgtcacggggatacgtcaggggctgcgttcgtgctcctgttgtacggcaatccttcctgctgatgaacccgtgtgcccgcgttgtagtaccaaagggtacgttcggcgtagaaacagcctgcagtggacactcgcgctgcttgtaacgtccatcatgctgtatcttccggctaatattttgcccatcatggtgacggatttattaggctcgaagatgccgtcgacgattctcgctggggtcattctgttatggagcgaaggctcttatcccgtcgctgcggtgatctttctggccagtattatggtgccaacgttaaagatgatcgccatcgcgtggctgtgttgggatgccaaagggcatggcaagcgcgacagtgaaagaatgcatttgatttatgaagttgttgagtttgtaggccgctggtcgatgattgacgttttcgttatcgcggtgctctcggcgctggtgcgtatgggaggtttaatgagtatttatccggcaatgggtgcattaatgtttgctttagtcgtcataatgacaatgttttctgctatgacgtttgacccgcgtttgtcgtgggatcgtcaacctgaatcagagcatgaggagtcctgacagtatggaatctaataatggggaagccaaaatccagaaagtgaagaactggtctcccgtgtggatatttcctatcgtcacggcgctcattggggcctgggttcttttttatcattacagccatcagggaccggaagtgaccctgatcaccgcgaatgcggaaggaattgaaggtggcaaaaccaccattaaaagccgtagcgttgacgtcggcgtggttgaaagcgccacactggctgatgatttgacgcacgttgaaatcaaagcgcggctgaattccggtatggaaaaattgctgcataaagacaccgtcttttgggtggtgaaaccgcagattggtcgcgaagggattagcggcctgggaacgctgctgtctggagtttatatcgaactgcagccaggcgcgaaaggcagcaaaatggataaatacgatttgctggactcgccaccgttggccccgcctgatgcgaaaggtatccgtgtgattctcgatagcaaaaaagccgggcagctctcgccaggagatccggtgctgttccgtggctatcgggtaggttcggttgaaaccagcaccttcgatacacaaaaacgcaatatcagctatcaactgttcatcaatgcaccttatgaccgactggtgaccaacaatgttcgcttctggaaagatagtggcattgcggttgatctgacgtcagcagggatgcgtgtggagatgggctcattgacaacgctgctgagtggcggtgtcagctttgatgtgccggaaggtctggatttagggcagccagtggcaccgaaaacagctttcgttttgtatgatgatcagaagagcattcaggattcgttgtacaccgatcacattgattatctgatgttctttaaagattcggtacgcggtctgcaaccgggagctccggtagagttccggggtattcgcctgggtaccgtaagcaaagtgccattctttgcgccgaatatgcgtcagacatttaacgatgattaccgtattccggtactgattcgtatcgagccagagcggctgaaaatgcagcttggcgaaaatgcggatgttgttgagcaccttggcgaattgttgaaacgtggtttacgcggatcgctgaaaaccggaaacctggtcactggtgcactgtatgttgatctcgatttctatccaaatacgcctgcaataaccggtattcgtgaatttaatggttatcagattatcccgaccgttagcggcggcctggcgcaaatccagcaacgactgatggaagcgttggataagatcaacaaactgccattgaatccgatgattgaacaggcaaccagtacgctttctgaaagtcagcgcacaatgaaaaacctgcaaacgacgctggatagcatgaacaagatcctcgctagccagtcgatgcagcagttgccgacggatatgcagtcaacgttgcgtgaattgaatcgcagcatgcagggcttccagcctggctccgcagcctacaacaagatggtggcggatatgcagcgccttgatcaggtgttgcgagaactgcaaccggtgctgaaaacgctcaatgagaagagtaacgcgctggtatttgaagcgaaggacaaaaaagatccagagccgaagagggcgaaacaatgaaaaagtggctagtgacgattgcagcactgtggctggccggatgcagctccggcgaaattaataaaaactattaccagttacctgtggtgcagagcggtacacaaagtaccgccagccagggcaatcgtctgttatgggtagagcaggtcactgttcctgactatctggcggggaatggtgtggtttatcaaaccagtgatgtgaagtatgtgattgccaacaacaacttgtgggccagcccgttggatcaacagttgcgcaacaccctggttgccaacctgagtacgcaactgcccggctgggtggttgcctcccagcctctgggaagcgcccaggacacgctcaatgttaccgtaacggagtttaacggtcgctatgatggcaaggtcattgtcagtggtgagtggctgttgaaccaccagggacaactgatcaaacgtccgttccgtctggaaggattgcaaactcaggatggttacgatgagatggttaaagtgctggccggtgtctggagtcaggaagccgcttctattgcacaagagataaagcgtctaccttaattataaagatttgtaaatataaccgtctccggtatgttgcctgaggcggtttttttgtctctaacgtgcggaaaaatttgttcctcttcacattttttgtacaaccgacatgcccgtgtagctcacaaatatgacagtggcgtgaattttgcgcattgacggcagttatgattcgcggtattgcttaactgtgattgcacatttagtaatcactgttttcttttccaccagaaaccagtatgagggaaacgaggcatgaagagacaaaaacgagatcgcctggaacgggcacatcaacgtggttatcaggccggcatcgccggacgctcaaaagaaatgtgtccctatcagacgctgaatcaaaggtcacaatggctgggaggctggcgagaagccatggcggacagggtagtaatggcctgattctgtctctttaaaaagaaacctccgcattgcggaggtttcgccttttgatactctgtctgattataatcagaaggcagacgtatcctggaacagaccgactttcaggtcgctggcggtatagatcagacgaccatcaaccagcacttcgccatccgccaggcccataatcagacgacggttaacaatgcgtttaaagtgaatacggtaggtcacttttttcgctgtcggcagtacctgaccagtgaatttcacttcgccaacgcccagcgcgcggcctttaccttcgccgcccagccagccgaggtagaaccctaccagctgccacattgcgtccaggcccaggcatcccggcataaccggatcgccaataaagtggcatccgaagaaccacagatccggattgatatccagttctgcttcaacataccctttgtcgaagttaccacccgtttcggtcattttgaccacacggtccatcatcagcatgttcggtgctggcaattgcgggcctttagcgccaaacagttcaccgcgaccagaggcaagaaggtcttcttttgtataggattcgcgtttatctaccatgttctctgtaagccttattttattgaagcacgcaggatagctaacacgtgtacgctgaacaagtccgatcagttcggaataaaccagttcagccaacgtaatggccatggaaaacggtgacgtccttcctgttgcgatgcttgcgcgatacgttcctggatggtttgcatcagcgtcgtttggccttcgccatcccacaccagatttaataataacggcagtgcgtcagtcacatcgtctactgcccagatggtgaatttgccttcttctaccgctttcaccagttcactgtgaagacttaaatggcgaacgttagctgtggggataatgacaccttgtttcccggttaactcacgttgctggcaaatagcaaagaagccttcgattttctcatttaaaccaccgaccggctgggcgcgaccgaactgatcgactgaacctgtgatagcgatactctgattcaccggcacatcggcgagggcgcttatcagggcgcagagttcagccatcgaggcactatctccatcaacttcactgtatgactgctcaaatgtcagcgatgctgagaaggggatctgttgctcaagctgtagttccgacatcaggaacgcttgcatgatcatcatccctttcgcatggatattgccgccaagctccgctttgcgttcgatgtcggtgaattcaccatcgccaatatgcacaacgcagctaatgcgagaaggttcgccaaaagcgcgtggatgacccggaaattcaatgaccgaaagggcgttaatttgcccgatgcgttcgccttcggtttcaatcaggatttgctcctgaaggatctcatcctgcatacgttcagcgaggaaaccttcgcgccattcacgctgctgcagcattaagtttagctgctcgccggagaaggtgtcgccatcacacagggaggcgacctctttacactggcggaggatccactgcgggctaagcggaagtgtttcttgttcaccggtgtagcgtgctgcttcgcggataagtatcggccaggcatccgctcccggtgcaggtaagtgattatgtctggcggtaaatgtcacccagcgacaccactgggttactgactccgcatcgacaatctgcagagtatcttcaaattcgctataaatagcctgctctgaaagctctggctccatctcctggaaatcagccaatgattcgcgttcgcctaccagaatgactttcagcttcaatggcatcgaaggcacagagacggggagagggcgcgactcatcaaacgcaacccagtcaaaacgctcgcggttaacgatatttttcagccgcatccacagcagaggttgcgccagcagtgtacgcaaagagatgatgagaataccgccatttgcctgatgcaccagaccaggctgcagggtaatgtcgccattaaaatggcgcaggcagccaaagagttgctccgcttctacccagtcggcagcgacaacttgcgttaaagtcgcaaaattatcatctgcactcactgcgtgacgtaagcggatggagtggccggaaacctcatagtgaccgcccaccagttggcctgcatcgctttgtagcgtacgcgcggcattggcaataagattcagatactcagactcttccggggccttcgccagcataaaagaggaggatgctcgcgtatgcagcaactgctccagcgcaaattgcagccgcggttgagtatcactgaataaaggatcgttttcgtcaatcaaatgtggctgagcaaatatttcctgatagctatcggtatcaggaaccaggtcacgccatgcaagtttcgtaatggtcaaagttgatgttttttagtctgttgtcaaagccgcgattataccgtaaccggcactacagcacacgtagaaagcaccgacaatactcctggcatgggcgttaaagctcacaggatggagattcttttcttcactggcctaaaaagctgatattctgtaaagagttacacggtaacattgagatcgctatgaaatatcaacaacttgaaaatcttgaaagcggttggaaatggaagtatctggttaagaagcatcgcgaaggggagttaatcacccgttacatagaagccagtgccgcccaggaagccgtcgatgtgttgctctcgctggaaaatgaacccgtgctggtaaatggctggattgacaagcatatgaatccggaactggtcaatcgcatgaagcaaaccattcgggcaagacgaaagcgccattttaatgcggaacaccagcatacgcgcaaaaaatcgatcgatctggaatttattgtctggcaacgtctggctggtcttgcgcagcgtcgcggtaaaacgctttctgaaacgattgttcagctgattgaagatgcggaaaacaaagagaaatacgcgaataaaatgtcttctctgaagcaggatctgcaggcattgctgggtaaggaataactgacgaaagtcagttcaatttactaaaggcaaaaaaaaccccgcagcagcggggtttttctaccagacgagaacttaagcctgcggctgagttacaacgtctttgatacctttaacttcgatctctacgcgacgatccggagccaggcagtcgatcagtgcagcacgctgtttcacgttgtcacaggtgttgccagtaaccgggttggattcgcccataccacgtgcggagatcttgtctgccgggatacctttggagatcaggtaatcaacaacagactgagcacggcgctcggacagaccctggttgtaagcgtcagaaccgatgcggtcggtgtaacccagaacaactacggaaccgtctttcggatccaggttgctcagctggctgtacagctgatccagagcagcctgaccttccggtttcagggttgctttgttgaagttgaacagaacgtcagacttcagagtgaagtgcttggtctgtacttccggtgccggagctggagccggagcaactactggagctgcttcgccctgaccgaaacggtaggaaacacccaggctcagcatgccgttgtccggacgagtgccgatggtgtgtgcgtcaccgatgttgttggtccactggtattccagacgggtagcgatttcaggagtgatcgcgtactcaacaccacctgcgaaaaccggagaaacgccagtgtcgtggtctttaaaggatgcgccaccaggtacgttagccttggtgtctgcacgccataccataccacccagacgagtgtatacgtccagatcgtcagtgattgggtaacccagtttagcagtcagttgaacgccctgagctttgtatgcaccgttgatgttgtcgcctttgtacggcatacgacctaaccagtcgtaacccatttcaaaaccaacatacgggttaacctggtaaccaccaaaagcacctgcacccagttggttttcgtgggtcggaccattgttaggaataaaaccagtgtcatggtactgggaccagcccagtttagcaccagtgtaccaggtgttatctttcggagcggcctgcgctacggtagcgaaaccagccagtgccactgcaatcgcgatagctgtctttttcattttttgcgcctcgttatcatccaaaatacgccatgaatatctccaacgagataacacggttaaatccttcaccgggggatctgctcaatattaactctaccgatatcttcggcttatgccgagcacccctggcgatgtaaagtctacaacgtagttgaaaacttacaagtgtgaactccgtcaggcatatgaaaaaaaagtcttgtataaggtacgtttaatcttttttgtcagcgacaatttacagaaaaaaatcgcggaaaccgcttcagacaagcctccgcaaggaaaattagtcacgactgaaagcattggctgggcgacaaaaaaagttccaggattaatcctaaatttacttaatgatacaaattagagtgaatttttagcccggaaagttgtctcgttgcgtgagaggatgcgcttaccggacgcataataaaccccatagcgttaccttcatttgccgcatcaacaagttcagcatgctcttcttcagtcaaatcatctgccaaccaaccgatcaccacactgtaattgcccgtgcgtaaagcgcgaaccattgactccacagtgtggcaaggggggagctggctaatctgcattactttcgttaagggtagcccagatgcctgaacccattcccgactcagtttttgttgcggtgttaaccagagttgccagcgcgattgctgaccgagttgctgtaacaatggcaacagtagaagttgcgtcatcatgggctgatcttcgcgatagacaacttcactgataagcccggctgtagtgttttccgtagagacacgcgcaattttacttgctgcggatgagaacgacgaagaacgatgtgcatagcctgaagtgtacataatcaatccagcccctgtgatttactgtatggatgtacagtacatccagtgacaacaaagatcaaccctattttcggaaagagcctcgcaaattttgtcgttggtgacgggaaaacataaattaatcttgcccctaaagaataagttgcctattttcgtatttaacggatccgttaatgtgaatcattcttttatgttatgattttaaaaggaattttatgaaaagcctctcctataagcggatctataaatcacaagaatacctggcaacgttgggcacaattgaataccgatcattgtttggcagttacagcctgaccgttgatgacacggtgtttgcgatggtttctgatggtgagttgtatcttcgggcttgtgagcaaagtgcacagtactgtgtaaaacatccgcctgtctggctgacatataaaaagtgtggccgatccgttaccctcaattactatcgggttgatgaaagtctatggcgaaatcaactgaagctggtgcgtctgtcgaaatattctctcgatgcagcgctgaaagagaaaagcacgcgcaatacccgggaaagactgaaagatttgcccaatatgtcttttcatctggaagcgattctcggggaggtggggattaaggatgtacgggcgttacgtatacttggggcaaaaatgtgttggttgcgactgcggcagcaaaacagtctggtgacagaaaagattctgtttatgcttgaaggtgccattatcggcattcatgaagctgcgctcccggtggcacgccgccaggagcttgcagaatgggctgactctcttacgccgaaacaggagtttcctgcggaacttgagtaatctggcgttgcagacgaccaatctcaggcagtaatgcaatcaataatccaacttgttgtacgaccagaggttctttgctgtctgcccgtggttcaagttgctgcatccgctgtttcaggctagctaatgcctcattgacgcgttcttcatcagcaggttgatgatgtaacgcgtcatcaacatagcaaactgcgtcatcaagaaacgccagaatttcaggattagttaactgctcccggtgagcaccgagggctgagatatagctggtaaacgtatggttaaggcacagcaaccgaaacgcggcttcgcgaatttgcggggtaacgttcggctcgctggacatatttgataccaccgacgccagctcagcatcacggttgtgtgcatcgcggcgggcaatacgatacgccagacggttatcacgcccctgatggtattgctccagtatggcatcgagataccgacagttggcctctgtggcgcgttcgagcatgcgcggcagattgcgaaactgccagtcaggccagatgtagctcactgccgcccacgcaatggcacaaccaatcagcgtatcgattacgcgaggtaacgctacttcaaaaccttcacccagtaagttaaaacacagtagcaccaaaagtgtgatgaacatcgttgcatgagcgtattgcacgttacggaaggcaaaaaagagcacgccggtaataaccagcagcaccagctgcccttccagtgatggcacaaaccacagcacaggaatgccaatggcgatacctaccagcgtaccaataatccttaacttcaggcggtggcgcgtggcgttatagtttggctggcagacaaacaaacttgtcagcaagatccaatacccgtgatgcattccggttatctgaatgatggcgtagccgaagcacaacaccagcgacattcttaccgcatgacggaagagggcggattccggcgtgaagtgacggctaagacgcagccagatatcactcaacccgtgcgggctgtcatcagcgagctcattttcgtcattattatggggtagtgcctgggcctgttctgattcaattgttgccagttgggcatcaatggcgcgtaaattgttcagcaaaaatcccagtgttttgagtaaatcggcgggtgcgccgttatcgcgcatccgctccagcgcagcatcaatatgcgtaaaagcgcgctcaaaatgcggatcatgttgataaggctgacgcaacaaaatacagcgtgacagttgctggcacgcctggccctgcatcgacatcagccgctgaaaacggaacagcacgtcgctgtggcgaaaatgttcacgcaatgtttgatactgaatatgagaagagctggcacgctcgtgaatatcctgtgcgacaaagtaataatgcagcgtgcgacgcgttccccgttgaccacgatcgccacgtaagcgggtcagcagcgagagtttcgtctgattcaatgtcgccatcagcagaccgttggcgagagccaaatcgtacagcggtgcctggctttgatcttcaatatcaggatcaaacatgcgcgacttgagctcaagataacgcgccagttgttcatagcaacgcgccaggttgtcctgcagcgggcggaccgggaacagcagatgaccaataagtgtcaggacgttgtaccagacggcaccggccagcagatacatcggctgctgataccagtgctcatacagtgatgttcccaacatagtgtaaatggcgatcagcaatgcaccgaaggcaattgttgcatagcgttgacccagaccgccgagcaaaatgaagccgctggtagagagcgttaagccaatcgcaaatagccagggccagggaaacagcaattctactgaggccgaggcgataaaaaagcagaacagcgtaatgatgaggttacgcaaacgtcccgccagtcggtcatcgagatcggtcagcgccgctgccaccatccccagcgttagcggaatcgtcagttttacatcacccagccaccacggaaacgctgtggttccacaaagcgcaataaaaatacgcgcgtaatacagccaggcgctgttccaggtatagcgtttgagcaaaggacttagcataaaggccatattagtggattattcaaaacgacgacgtgcattggcttcacgcgcagcttgcgctgtttctaccgataccacgcgacgaccaaccggccatagtgcaatagcggcaattttaaagttcgcaatgccgacaggaatgccaatgattgaaatacattgtgcgatgcccgttgcaatgtgcatcaggcataaccaccagccaaagaaaatcagccagaaaatattcaataccgtaccgccagtattcagcagcacatttttgccagccgggttcagttcatcgacatgaatagcttcattgccataaggcaccagagacagtttagtgatctcccagcaggatcgtgtcagcggtaaggtaaaaatcagcacaatactgaccagagtcgccaacagccagcccagagtggtggcaaatccgccaagcacaaagttcagaatgttcaaaacggtacgcataaaacctcgctttactgtggttttcagtaatgggcggcaattgtaacgtttttttgggctggagcacgttttctctgacggttacactgataagaaataatttcgtgtggatctacagagtcatggaactgaaagcgacaacgcttggaaaacgtctggcacagcacccttacgatcgggcggtgatcctcaatgccgggattaaagtctccggcgatcgccacgaataccttattcctttcaatcaattactggcgattcactgtaagcgcggtctggtatggggcgagctggaatttgtactgccggacgaaaaagtggtgcgtctgcacggcaccgaatggggcgagacgcagcgtttttaccatcatcttgatgctcactggcggcggtggagtggcgagatgagcgaaattgcgtctggtgttttacgccagcaactggatttgattgccacgcgcactggggaaaataaatggctgacgcgtgagcaaacctctggcgtgcagcaacaaatccgccaggctttgtcggcgttgccgttgccggttaaccgactggaagaattcgataactgccgtgaggcgtggcgtaaatgtcaggcctggttgaaagatattgaaagcgctcggttgcagcataaccaggcgtataccgaagccatgcttaccgagtatgcggattttttccgccaggtcgagtcttcaccgctgaatccggcgcaggcccgggcagtcgttaatggcgagcattctctgttagtgctggcaggtgcaggaagcggaaaaacgtcggtgctggtggcccgtgcaggctggttgctggcgcgtggtgaagcgtcccctgagcaaattttattgctggcgtttggtcgcaaagccgctgaagagatggacgagcggattcgcgaacggctacataccgaagacattaccgcacgcacgtttcatgcgctggcgctgcatattattcagcagggcagcaaaaaagttccgatagtcagcaaactggaaaatgataccgctgcccgtcatgaactctttattgctgagtggcgcaagcaatgcagcgaaaagaaagcgcaggcgaagggctggcggcaatggctgacggaagaaatgcagtggtcagtgccagaaggtaacttctgggatgatgaaaaattacagcgtcgccttgcctctcgcctcgatcgctgggtaagtctgatgcggatgcacggtggtgcacaggcagaaatgattgccagtgcacccgaagagattcgcgatctgttcagtaaacgtatcaagttgatggccccgttattaaaagcctggaaaggtgcgctgaaggcagaaaacgctgtcgatttttcgggccttattcatcaggcgattgtgattctggagaaaggtcgctttatcagcccgtggaagcatattctggttgatgaatttcaggatatctcgccgcagcgggcagcgttgttagcggcattacgcaagcaaaacagtcagacgacgttgttcgccgttggtgatgactggcaggcgatttaccgattcagcggtgcgcaaatgtcgctcaccaccgctttccatgaaaactttggtgaaggcgatcgctgtgatttagacacgacttaccgttttaacagtcgtatcggtgaggtggcaaaccggtttattcagcagaacccaggccagctgaaaaagccgctaaacagcttaaccaatggagacaaaaaagccgtcacgttattggatgagagtcaacttgacgctttgctggataagctctctggttatgccaaaccggaagagcgcattctgatcctggcgcgttaccatcacatgaggcctgccagcctggaaaaagcggcaacacgctggccgaagttgcaaatcgactttatgaccattcatgccagcaaagggcaacaggcggattacgtcatcatcgttggcttgcaggagggaagtgatggttttccggctgcggcgcgggagtcgattatggaagaggcgctactgccaccggttgaggatttcccggacgctgaagaacggcggttaatgtacgtggcgctgacccgggcacgccatcgggtatgggcactgtttaacaaagagaatccctctccctttgtggaaatactgaaaaatctggatgtgccggtggcgagaaaaccgtaagaaacaggtggcgtttgccacctgtgcaatattacttcagacggtccgcgagataacgctgataatcggggatcagaatatcgaccgcgtcgttgaaatgcggcgactggattatgaagtctgccgttgccacgttggtggcgaccggaatgttccataccgtcgccagacgcagcaaggctttcacgtcaggatcgtgcggcacggcatttagtggatcccagaagaaaatcaatacatcaattttcccttctgagatcaatgcgccaacctgctggtcaccccccattgggccactcaacatcgcgttgacgttcatgccggttgcacgggaaatcaagttaccggtagtgcctgttgcatacagtacgtgttgttccagtaacggttgatgccgttccacccagctcatcagcatttgtttgcagtgatcgtgtgccaccagcgcaatatgtttccgcgcaggtaaagtgcgagtcgtcagttccataatgtacatccgtagttaactttcctacagattactgtaagcacttatcgctgcaagataaagaccgaaaaagcctgcgcacaggcacaaaaatctcaggaagatggttgtttttccgcccactgcaggaaagtatttcgcgtttgtgggtcagccagtttaaaccaatacttcagccgttgttctgtgagcacctgagactgcggtggaatagcatccagctcggaaacacccgaaagcagcgtactgtcatctgccatcatcgtggcaaattgcggtagtgaagcgcgtttcgcggatttgttatagcgttcaacctcgacctcataatcaatcgtttttgccgttgaggtaatggcgagaatatccagctttaccggaatcggcgtcgcatcgccatccaacaattcaaggcgcggcgcggcatcaaaatggttagcttcccgctcattctccaggcgaggcaggcgaaaattgacctggttgatgagctgggtattaaaactgaccaccagcggtggggagatatacagccgttcttcactattggaaagatgaatcgtcttctcaacgcgaaacactaactgatgcggtccattatccagttcaatgctgtccgcaccgcgcagcagagagctggaaaccttcttgccgtcgagtaccagaagatcgacatcggttgaaagccgcagcgtggtggcaaaaacggataccggcaaacataatgcaatcaaggtggtcacgatgccggttttcataggtagctcctgtcaaaagaccgcccgaataataatgtgtcaaaatttttctttaatcatacttactaacatatagacatatttcccgcttttgctctcattcattcgtattagctgcatggttggcatgtcggctttgtcgtacactttgttaaacagtctggaggaaataatgaaagaaaccgatattgcaggcattttaacgtccactcacaccattgcgctggtgggggcaagcgacaaacccgatcgtcccagctatcgcgtgatgaaatatctactcgaccaggggtatcacgtcattccggtttcgccaaaagttgccggcaaaacgctgctgggccagaaggggtatggcacgctggcagacgttccggaaaaagtcgatatggtcgatgttttccgtaattcagaagcggcgtggggcgtggcacaggaagctattgccattggcgcgaaaaccctctggatgcaactgggggtgattaatgagcaagcggcagtactggcacgggatgccgggttaaatgtggtgatggatcgctgcccggctattgagatccctcgcctgggcctggccaaataaaaaatccccggaaggcaaaaaccttccggggatttgttcagggattagttacgcagacgcggggcctggagttgtttgcggatggtctgcgccagctcatccatggatggctgttcaggatgttcatcctgcaattcgctacttagctgggcttcagccaggtaggtatgaaccggtaggccgttatcgtcctccatcactacgtgataccacggagcggcgcgaagctcgtcattcaccgccagctcatcaggcgacggttcagagagcgaataaaccgggtcgatatccacgaccactccgagataacctaacagggaatggcggacctgctggccgataccgaatttgctggcaatcatagtcacctcccgggaaatctttacctttgatataagggtaaaattccacatttcaagttacatgacgcgacaggcaaaccctttcagatatagcccttccggataggtagcgatcaccggatgatcggctgcctgacggaactgctctataaattgtacatcacgaccggcatcaattgcggcatccgcgatgattttctgaaataaatcgctggtcatcagaccggaacaggagaaagtcaggagaataccgccttcattcagcagctgaatcgccagcatgttgatgtctttataaccacgacacgcgcccatcaactggcttttattctcaacaaacttcggcgggtccatcacgataacgtcaaatttttcaccgcgatcgcgataagtacgcagcaatttaaagacatcatcacggacaaactcagccttgctcagatccagtttgttcagctcaacgttctgccgtgcaatatccagcgcttcctgggaggtatcaacgctgacaacctggctgcaaccgcccatcagtgccgatacggcgaaaccaccggtataggagaaacagttcagcacacgtttattttcaacgtagcggcgggtagccaggcggctatcacgctggtccaggtagtagcccgttttgtgtccgtgctgaatatccaccagcagtttcattccgtgttcttcaatcggcagcagggcaggtggcaactcgccggtgacggggccctgggtcagctccattccttcttttttacgtaccgcgacgtcgctgcgatcgtaaatcgaacattccgggtacagcgtttgcagggcactaattaatgccgcgcgctgatattctgccccagcactcagcagttgcagcaccagaaaattaccgaaacgatcgatagtaatacccggcaggccatcagattctccggcgattaaacgatagctgtcgaggccatctttttgcgccagccagtcacgccatttttgtgcttgttgcaaacggcgggaaaaaaaagcaatgtcgatagactcagacgggtcaaacgtccagacgcgcgcccggatttgcgaagctggcgaataagcgccgcgtgctaaccattttccctgatgatcaacaatatcgatggtttcaccgaggctggctttaccttccatgcgggcaacggccccggaaaagacccacggatggcgacgaagtaatgatttttcgcgccctttggctaacactaaacgtacactcataatttacttttctgtcgatgcaaagaaacgggcgtcattgtccggagttttccatggatttgcaacgcgtccattaaggataaggagagcagcaatgtcgaaagtctgcataattgcctgggtttacgggcgagttcagggcgtaggatttcgctacaccacacagtacgaagcgaaaagactgggtttaaccgggtacgccaaaaatcttgacgatggcagcgtggaagtggttgcttgcggtgaagaagggcaggtggaaaaattaatgcagtggttaaagagtggcggcccgcgttctgcgcgtgtagaacgggtgctcagcgagccgcatcatccctcgggggaattaaccgattttcgtatccgttaaatacattttaccggttttggcaggccagcaattttggtggcttgcttagccggacctttcggaaacagtcggtataaatagcggctgttacctttttcttcgccaaatttattcgccatcgcttttaccagcatacgaatcgccggagaagtattgaattccagatagaaatcacgcacaaaacgcaccacttcccagtgttccggtgacagcgaaatcccttcgttctctgcaatcaccacagccagcggctcactccactggctgctttctttgagatagccttcggtatccgtttctatctctttaccttcgaagatcagcataattattactaccttaatcagactggcggcagtgtaacaaaaaacaaagccccgcataaagcgaggctatgaaagtgttagcgggtgagattaatcgcggctagcgaagcccagaatgctcagcaggctgacgaagatgttgtacagcgaaacatacaggctaaccgtggcacgaatatagttcgtctcaccgccatgaatgatgttgctggtttcaaacaagatagcgccagaggagatcagaatgaagaccgcgctgatcgccagatgcagagcaggcagctgcaggaagatattcgcaaccataccaatcagcaccaccacaatacccgccatcagcataccgccgaggaacgacatatctttgcgggtggtcagcacatatgcagagcagcagaagaacactaacgccgttccgcccagtgccatagcgattacgtcacccattccggcagacagataggtgttcagaataggtccgaggatataacccagaaaaccggtaaaggcgaatgcggagataatcccggtcggcttattcgccgttttataggtcaggaacatcaaaccatacatacccaccagcgtcagaatcagacccggagatggcagcatcagcaccgtactggcagttgcggtaatcgccgaaaaggccagcgtcaggctcagcagaaaataggtattacgcagcaccttatgggtgctaagcagtgatgtacggtcatgtgaagaactaacaatacgatccattgagtcactctctatgacagatgtaattaattaagcagcataatgataatgcgtaagggcacccagaagttttacccatctttacgcatttgatctggaacaggtttaacagcggattatcaggtcattaagcaaatataacgccctgagaatttcgacaggcaaaagaaaaaggggttagcatttagctaaccccttatcttatttggcggaagcgcagagattcgaactctggaaccctttcgggtcgccggttttcaagaccggtgccttcaaccgctcggccacacttccgtaatgacgctcactataaacatcccgatgcggcgtgtaaacccctaatttgtttgtttgcctgaaaaacagccaaaagtgcattgatagcgtgaaataacagcagattgatcatttcatcaccatgaattccttctcttttactcgtttagcaaccggctaaacatccccaccgcccggccaaaagaaaaataggtccatttttatcgctaaaagataaatccacacagtttgtattgttttgtgcaaaagtttcactacgctttattaacaatactttctggcgacgtgcgccagtgcagaaggatgagctttcgttttcagcatctcacgtgaagcgatggtttgccttgctacagggacgtcgcttgccgaccataagcgcccggtgtcctgccggtgtcgcaaggaggagagacgtgcgatatgaataacgaggaaacattttaccaggccatgcggcgtcagggcgttacccggcgcagctttctcaaatattgtagtctggctgccacgtcgctgggattaggcgcgggaatggcaccaaagattgcctgggcgctggagaacaaaccgcgcattccggtggtatggatccacggtctggaatgcacctgctgtaccgaatcttttatccgctccgctcacccactggcgaaggacgtcatcctttccctgatttccctcgattacgacgatactttgatggctgccgccggaacccaggcggaagaagtctttgaagacatcatcacgcaatacaatggcaaatatatcctcgcagtagaaggtaatccgccgctgggcgagcaggggatgttctgtatcagcagcggtcgaccgtttattgagaaactcaaacgtgccgctgccggagccagcgcgattatcgcctggggaacctgcgcgtcctggggctgcgtgcaggccgcgcgacccaatccgacgcaggcaacgcctatcgacaaagtcatcaccgacaaacccattatcaaagtacctggctgcccgccgatcccggatgtgatgagcgccatcattacttacatggtgacctttgatcgcttgccagatgtcgacagaatgggccgtccgctgatgttctatggtcagcgaatccacgataaatgctatcgccgcgcccacttcgacgccggagagttcgtccagagttgggatgatgacgctgcccgcaaaggttactgcctgtacaaaatgggctgcaaagggcctaccacctataacgcctgttcctccacacgctggaatgatggcgtttctttcccaatccagtctggtcacggctgcctgggctgtgcggaaaatggtttctgggatcgcggttcgttctacagccgcgtggtcgatattccgcaaatgggtactcattccaccgccgataccgtcggtttaaccgcgcttggcgtggtggcagcggctgttggtgtgcacgcagtcgccagcgccgttgaccagcgcagacgtcataaccagcaacctacagaaaccgaacatcagccaggcaatgaggataaacaggcatgagcactcagtacgaaactcagggatacaccatcaataatgccggacgccgcctggtggtcgacccgattacgcgcatcgaaggccacatgcgctgcgaagtgaatattaacgatcagaatgtgatcaccaatgccgtctcctgcggcaccatgtttcgcgggctggagatcatcctacaagggcgcgacccgcgcgatgcgtgggcgttcgttgaacgtatctgcggcgtctgtactggcgtacacgccctggcttcggtttacgccatcgaagatgctatcggtattaaagtgccggacaacgccaatatcatccgcaacattatgctggcaacgctctggtgccacgatcatctggtgcacttctatcagcttgccgggatggactggatcgatgtgttagatgcgctgaaagccgacccgcggaaaacctccgaactggcgcaaagtctctcctcttggccgaaatcatcccctggctatttcttcgacgtacaaaaccgcctgaaaaaatttgttgaaggcgggcagttggggatcttccgcaatggctactgggggcacccgcagtacaaactgccgccagaagctaacctgatgggctttgcccactatctcgaagctctcgatttccagcgtgaaattgtcaaaatccacgcggtctttggcggtaaaaacccgcatccaaactggattgtcggcgggatgccttgcgccatcaacattgacgaaagcggcgcggtcggggcagtcaatatggaacgcctgaacctggtgcagtcaattatcacccgcacggcggacttcattaacaacgtgatgatccccgacgccttagccatcggtcagttcaacaaaccgtggagcgaaatcggcactggtctttctgataaatgcgttctcagctacggcgcattcccggatattgccaacgactttggcgagaaaagtctgctgatgcctggcggcgcggtgattaacggcgacttcaacaatgtgctgccagtggatttggttgatccgcagcaggtgcaggagtttgtcgaccacgcctggtatcgatatcccaacgatcaggtcgggcgtcatccgttcgatggcatcaccgacccgtggtacaaccccggcgatgtcaaaggcagcgataccaacattcagcagctgaatgaacaggaacgctactcgtggatcaaagcgccacgctggcgcggtaacgcgatggaagtggggccgctggcgcgcacgttaatcgcttatcacaaaggcgatgctgcgaccgttgagtcggtcgatcgcatgatgtcggcgttgaacctgccgctttccggtatccagtcaacgttaggccgcattttgtgccgcgcgcacgaagcgcagtgggccgcaggtaagttgcagtatttcttcgacaagctgatgaccaacctgaaaaacggcaatctcgccactgcttccacggaaaaatgggaacctgcaacctggccgacagagtgccgtggtgtcggttttaccgaagcgccgcgcggggcgttaggccactgggccgccattcgcgatggcaagattgatctctaccagtgcgtggtgccgaccacctggaacgccagcccgcgcgatcccaaagggcagattggcgcttatgaagcggcgctgatgaacaccaaaatggcgatccccgagcaaccgctggagatcctgcgtactctgcacagctttgacccgtgcctcgcctgttcaacacacgtgctgggcgacgacggtagcgagctgatctccgtgcaggtgcgttaacagcgaaggagaatcatcatgcaacagaaaagcgacaacgttgtcagccactatgtctttgaagcgccagtgcgcatctggcactggttgacggtgttatgcatggcggtgttgatggtcaccggatactttatcggcaagccgctaccttccgtcagcggcgaggcgacgtatctgttctatatgggctacatcaggttaattcacttcagcgccgggatggtttttaccgtggttttgctgatgcggatctactgggcttttgttggcaatcgatactcccgcgagctgtttatcgtgccggtatggcgtaaaagctggtggcagggcgtgtggtatgaaatccgctggtatctgtttctggcaaaacgtccgagtgccgatataggccataatcccatcgcccaggcggcgatgttcggctatttcctgatgtcggtctttatgatcatcactggttttgcgctgtacagcgaacacagccagtacgctatttttgcgccgttccgttatgtggtggaatttttctactggacgggtggcaactcaatggacattcacagctggcatcggctggggatgtggctgattggcgcgtttgtgatcggtcatgtctacatggcgctgcgtgaagacatcatgtccgacgacacggtgatctccaccatggtcaacggctaccgtagccacaaatttggcaaaataagtaacaaggagcgttcatgagcgagcaacgcgtggtggtcatggggctgggcaacctgctgtgggccgatgaaggcttcggcgtgcgggtggcggaacggctgtatgcccattaccactggcccgagtatgtggagattgtcgatggcggtactcagggactgaacttgctggggtatgtcgaaagcgccagccatctgttgattctcgatgccattgactacgggctggaacctggaacgctgcgaacctatgccggagaacgcattccggcttatctcagcgcgaagaaaatgagcctgcatcagaacagtttctccgaagtgttggcgctggcggatatccgcggacatctgccagcacatattgccctcgtcggtctgcaacccgcaatgctcgacgactacggcggtagcctgagcgaactggcacgggagcaactgcccgctgcggaacaggcggcgctggcgcagcttgctgcgtggggaattgtgccgcaaccggctaatgaatcgcgctgtctcaattatgactgtctgtcgatggaaaattacgaaggcgttcgcttgcgccagtaccggatgacacaggaggagcagggatgagcaacgacacgccatttgatgcgttgtggcaacgaatgctggcgcgcggctggacgccagtcagtgaatcccgtcttgacgactggcttacgcaagcgccagacggcgtggtgttattaagcagtgacccgaaacgcacgccagaggtcagcgataatccggtaatgattggcgaattactgcgcgagtttcccgactatacatggcaggtggcgattgctgaccttgagcagagcgaagccatcggcgatcgctttggcgtctttcgctttcctgccactttagtgtttaccggcggaaactatcgcggcgtgctgaatggtattcacccgtgggcggaactgataaacctgatgcgcgggcttgtcgaaccgcagcaggagcgtgcctcatgagcgaaacttttttccatctgctggggccaggaacgcaaccgaacgatgacagtttcagcatgaatccactgccgatcacctgtcaggtgaatgatgaaccgagtatggcggccctggagcaatgtgctcacagcccgcaggtgattgcgctgttaaacgagttacaacatcaactaagcgaacgccaaccgccgttgggcgaggtgctggcagtcgatctgttaaatctcaacgccgacgatcgtcactttatcaatacgcttctcggggaaggggaagtgtcagtgcgcattcagcaggctgacgacagtgaaagtgaaatacaggaggcgatcttctgcggattatggcgggtgcgcagacgtcgcggcgaaaagttgctggaggacaaactggaggctggctgcgcgccgctggcgttgtggcaggcggcaacgcaaaatctcttgccgacagattcgctgttaccgccgcccattgatggcctgatgaatggcctaccgttggcgcatgagttactggcacatgtacgtaaccccgacgcgcagccgcacagcattaatctgacgcaattacccatcagcgaggctgatcggctttttctctcacgtctctgtgggccgggaaatattcagattcgtaccattggctatggcgagagctatatcaacgccacggggttacgccatgtctggcatttacgctgtacggacaccttaaaaggcccgttactggaaagttatgaaatctgcccaataccggaagtggtgctggcagcgccagaagatttggtcgactctgcgcagcggcttagcgaggtatgtcagtggctggcggaagctgcaccgacgtaaaaagacggtaagtatcgctttcagtcttatgaatatcgcaatcggcgaatacctctggtcgtagagtttcaggataaagagggagatctaccattatcgggttatttttctctcttcgcctacaggagtgcgcatgtgggatgtcattgatttatcgcgctggcagtttgctctgaccgcgctgtatcactttttatttgtaccccttaccctggggctgatttttttgctggctattatggaaaccatttacgtggtcaccggcaaaacaatctaccgcgatatgacgcgcttctggggtaagctcttcggtatcaattttgctcttggcgtggctaccggcctgaccatggagtttcagtttggtactaactggtcattctattccaactatgtgggcgatatttttggcgcaccgctggcgatggaagcattaatggccttcttcctcgaatccacctttgtcgggctgttcttcttcggctggcaacggctgaataaataccagcacctgctggtgacgtggctggtggcgttcggttcaaatctctctgcgttgtggatattgaatgccaacggttggatgcaatacccgaccggtgcgcattttgatatcgacaccctgcgtatggagatgaccagcttcagcgagctggtctttaatccggtcagccaggtgaaatttgtgcacaccgtaatggcgggctacgtgaccggggccatgtttattatggcgatcagcgcctggtatttactgcgcggacgggagcgcgatgtcgcattacgctcgtttgccatcggttccgtcttcggtactctggcgattatcggtaccctgcaactcggagacagttctgcgtatgaagtcgcgcaagtacaaccggtaaaactggcggcgatggaaggggagtggcaaacggaacctgcacctgcaccgttccatgtggttgcctggccggaacaggatcaagagcgtaacgcctttgccctcaaaattcccgcgctgctagggatcctcgccactcactcattagataaacccgtgccgggtctgaagaatttgatggctgaaacctacccacgcttgcaacgcggacgtatggcctggctgttaatgcaggaaatatcgcaaggcaatcgtgagccgcatgtgttgcaggcattccggggactggaaggtgacctgggctacggcatgttgctctcccgctatgcgccggatatgaatcatgtcacagccgcacagtaccaggcggcgatgcgtggcgcgatacctcaggttgcgccggtattctggagtttccgcatcatggtgggctgtggttccctgctgctactggtgatgctgattgcgcttgtccagacgctgcgtggcaaaatcgaccagcatcgctgggtgctgaaaatggcgctctggagtttgccgttgccgtggattgcgattgaagccgggtggtttatgaccgagtttggtcgtcagccgtgggcgatacaggacatcttaccgacatactccgcgcactccgctttaaccacaggacaactggctttctcactgatcatgatcgtagggctttacaccctgttcttaatcgccgaagtctacctgatgcagaaatatgcccgtctggggccgagcgcgatgcagagtgaacaaccgacgcagcaacaggggtaaaggagaaaatcatgtttgattatgaaacattgcgcttcatctggtggctgctgattggcgtgatcctggtggtctttatgatctccgacggatttgacatggggatcggctgtctgctgccgctggtggcgcgtaatgatgatgaacgccggatagtgataaacagcgttggtgcacactgggaaggcaaccaggtctggttgatcctcgctggtggggcattatttgccgcctggcccagagtgtatgcagcggcgttttccggcttttatgtggcgatgatcctggtgctgtgctcactgttcttccgcccgctggcctttgattatcgcggaaaaatcgccgatgcacgctggcgtaaaatgtgggacgccggtctggtcatcggcagtctggtgccgccggtagtcttcggtatcgccttcggcaacttgttgctcggcgtgccgtttgccttcacaccgcaattacgcgtggagtatctcggcagcttctggcaactgctgacgccattccctttattgtgcggattgctcagccttgggatggtgattttgcaaggtggcgtctggttacaactgaaaactgttggtgtgattcatctgcgttcacagctggcgaccaaacgcgctgcactgttggtgatgctgtgctttttgctggcgggttactggctgtgggtcggtattgatggctttgtactgctcgcccaggatgctaacggtccttccaatccgttaatgaaactggtggcagtgctacctggtgcctggatgaataattttgtcgagtcgcccgttttgtggatcttcccgctgctgggattcttctgcccattgctgacggtgatggcgatttatcgtggtcgcccgggttggggatttttgatggcatcattgatgcaatttggcgtgattttcacggcaggcatcacgctgttcccctttgtcatgccgtcaagcgtgagtccgatctccagcctgacgttgtgggacagtacttccagtcagctgacgctgagcattatgttggtaatcgtgctgatatttttgcccattgtgttgctctacactctctggagctactacaaaatgtgggggcgcatgacaacagaaactctccgccgtaacgaaaacgagttgtactaaggagcagaaacaatgtggtatttactttggttcgtcggcattttgttgatgtgttcgctctccacccttgtgttggtatggctggacccgcgtctgaaaagttaacgaacgtaggcctgatgcggcgcattagcatcgcatcaggcaatcaataatgtcagatatgaaaagcggaaacatatcgatgaaagcgatcttaatcccatttttatctcttctgattccgttaaccccgcaatctgcattcgctcagagtgagccggagctgaagctggaaagtgtggtgattgtcagtcgtcatggtgtgcgtgctccaaccaaggccacgcaactgatgcaggatgtcaccccagacgcatggccaacctggccggtaaaactgggttggctgacaccgcgcggtggtgagctaatcgcctatctcggacattaccaacgccagcgtctggtagccgacggattgctggcgaaaaagggctgcccgcagtctggtcaggtcgcgattattgctgatgtcgacgagcgtacccgtaaaacaggcgaagccttcgccgccgggctggcacctgactgtgcaataaccgtacatacccaggcagatacgtccagtcccgatccgttatttaatcctctaaaaactggcgtttgccaactggataacgcgaacgtgactgacgcgatcctcagcagggcaggagggtcaattgctgactttaccgggcatcggcaaacggcgtttcgcgaactggaacgggtgcttaattttccgcaatcaaacttgtgccttaaacgtgagaaacaggacgaaagctgttcattaacgcaggcattaccatcggaactcaaggtgagcgccgacaatgtctcattaaccggtgcggtaagcctcgcatcaatgctgacggagatatttctcctgcaacaagcacagggaatgccggagccggggtggggaaggatcaccgattcacaccagtggaacaccttgctaagtttgcataacgcgcaattttatttgctacaacgcacgccagaggttgcccgcagccgcgccaccccgttattagatttgatcaagacagcgttgacgccccatccaccgcaaaaacaggcgtatggtgtgacattacccacttcagtgctgtttatcgccggacacgatactaatctggcaaatctcggcggcgcactggagctcaactggacgcttcccggtcagccggataacacgccgccaggtggtgaactggtgtttgaacgctggcgtcggctaagcgataacagccagtggattcaggtttcgctggtcttccagactttacagcagatgcgtgataaaacgccgctgtcattaaatacgccgcccggagaggtgaaactgaccctggcaggatgtgaagagcgaaatgcgcagggcatgtgttcgttggcaggttttacgcaaatcgtgaatgaagcacgcataccggcgtgcagtttgtaatgcataaaaaagagcattcagttacctgaatgctctgaggctgatgacaaacgaagaactgtctaatgcgtagaccggaaaaggcgttcacgccgcatccggccactttcagttttactctttctcggagtaactataaccgtaatagttatagccgtaactgtaagcggtgctggcgcgtttaatcacaccattgaggatagcgcctttaatattgacgcctgcctgttccagacgctgcattgacaaactcacctctttggcggtgttcaagccaaaacgcgcaaccagcaggctggtgccaacagaacgccccacgaccgcggcatcactcaccgccagcatcggcggcgtatcgacaatcaccagatcgtaatggtcgttcgcccattccagtaattgacgcatccgatcgcgcatcagcagttcagacgggttaggtggcacctgaccgcgagtaatcacatcaaagcctcctttgccaaaatgctggatcactttgttgagctcatctttacctgccagatattccgacaagccatgttcattactcacggtaaacaggttatgcgaataaccacggcgtaagtcggcatcaataaataacactttttgatcggactgggcgatcaccgctgccagagttgaactgacaaacgttttaccaccgtctggcgtcgcaccggtgatcatcagaatgttattctccgtctccatcatagcgaaatgcagactggttcgtagcgcacgtacggcttccacagcagaatccgccgggttatccaccgccaggaaggggatatttttagtacgatggcgctgctgattagaaaataaatttttcttacgcagacgggtgcgtttatccagccactcggacattgggatagtggcataaacgctgatgccgtgctcttccagttgttccggtgcttctacaccacgacgcaacatcgcacgcgccagcacggcacccaccgaaataaacaggccaagaataaaaccaagcaccacgttcaacgcttttttcggtttcactggctgcggctgagtgactgccgggtcgataatccgcacgttaccaatggcactggatttcgaaatactcaactcctgctggcggttaagtaattgcagatataccgcacggcccgcttctacgtcacgacttaaacgcaacacttcctgttgggtggaaggcatagccgatacccgcttattcaggcgtttgcgttcttgctccagcgtctggcgtttttccagcagcgcacgataagttgggtgatctttcttatacagctgggagatctctgcctcgcggaaggtcagctcattgagttgattatcaacgttaacaatctgctcaagaacggctttggcttccaggttaaggtcaaccgaatcgcgctgctggcgataaacgttgagtttttcttccgcctggtccagctcgctgcgcacttcaggcagctggcgctgtaagaattcaaggctttgtgaatcctgcgccgcctggcgagcgatattctgttgcaaatagttgttagcgatgctgttcagaatacgagtaatcaactggggatcatcacccgtcatggtaagttccagcatcccgctttctttactgcgttcgctaacggtaaaggtttcctgcaacgcgttaatcgcttccagttcggtacgctggctcaggacaaactgtgttcctggtttggccttaatatccgcgatagtcagcgcaacgccatctttttccagacgctggccgaccataccattgacggtgaactcttcaccttccagcgtatagtggccgttttccccaaccgtgagtgtcagttgctgatcctgaccattcagttgtggaatatgcatccagctgatcgccagctcacctggtttttctttggttaatctcgcccagccgcgacccacaatcggaaaatacttctgctcaaccatgtcgcgcagattcagttcagcaatggttttaccgagaatcatgcgcgattgcagcagttggatctccggtgcagattcgggcgatgagttagggatcatatcgctcaggccgctgagaatggcgttgccctgtttctgctcaacctggaccagagtatctgcctgataaattggtgtgcttaacagcgagtaagcgacagcgatcagcgtgaataacgcggtcacgctgataataaacttacggtgatcccataactcgccgaccagacgaagcagatcgatctcattttcctgagtgctgcctggtggcgtattcatatttttagttgtcatcgtattttataaactcaaattaccggctgaggcgcttcgcccattcctgactggcgcgctccaacataccgtagacatgttcaaatgcgtcctgacttttacgatagggatccgggatctctttctgttccagccattgcccaaacagcattgtcttcccgcggacctcgggagcgattgcggtaacctgagcaatatgttccgactccattgccagaatcagatcgtaatttcgtgccatctcagcagtgagcttacgtccggcatgtccttcaagagatacgccatgattagcggcaacatctgccgctgtcgcatctgcagggtgttttaccagaccatgaacacctgccgaattgacttttacgcccggcagacgtttacgcagcaagcgctcgccaatgggcgaacggcaaatgttgccggtacaaaccaccaggattgagttaaattttagttgggccatgtttgaatccaccgtgaagtctctgtcaggtcatgcaccccggaaatcgtcggtaccagcagagaaatcacacggttccaacgagccagcggcgcggtagtgacataaacaatgtcgtaaggttcaagctggaattccgttccgagtatcattgccgatgcgtccttcgcattcagctgataaatattggcgattttgccattctgcttgttttgcgttgcacgaataacaaaaatccccgtcgcatcagcgacatcctgattcataccctcagcgttacccagcgcttccgccagggtcataccgctgcggtccattttcagcgtgctctgtttacccacttcacccatcacgaagactttcagatcatcgttgcgcggaataaataaaatatcgcccgggtgcagcagtttgttctggcgcaagtcgccacgctgcatcagcgcatagaggttcactttggtctttacgccattctgggtgagcaccacgttgcgccagtctgcatctgcggtcagaccgcccgcggcgttaatcgcatccatgatggtcagaggaatattggtaatcggctgctgacccgatttgctgacttcgccggtgacgtacgctttttgcgagcggaacgccgcgacgctgacatcgacttgcgggctttcaatgactgaatccagacgcgctgtaatctcgttgcgtacctgggtaagtgttttcccggccactttcaggcgaccaatataggggtagaaaatcgcaccatcggcgttaacccagttgccggtatcactggcgctacggtattgccctgcgggggtggttagttccgggtgatcccagaccgtaaccatcaacacatcaccaatgccgatacgatattcatagttcgcgatttgctgctccagctccgggttagcctgcgacataatcggtttggcgcgcagctgatcaatcaatcctggcgtgacgggatagatattgaccattttgtccaggtcatactgattgtcaggtagttcaatgacatccttgttactggtcgataaattctgaccaggaacaagggtacatgctgtcaaagacagaacagccaatgtcagtaccgaaaacttaaaaatgttctttttcattggtttatatttatcagtcaatgtaatgttatgaattacgtcaggttattgtccaaccggtacttctcgctctgccgtcattggatagagctggtatttgcgtgacagcatttgtccaccatcacgcgtcaatggtgtccacgaaaccaccgcgcggttgcggttaggtccaatggtcatcaagtcgaacggaatcgagatataaaaacctttactaaagccgccttcgccgtagtcatctttagatacgttactgattgccgcccatacccctaccgccacgccgctgtcaaagcgtttggcgacatcgatcgttgcgcctttatcttttgccagatattgcccaacgctaagtttcatcagtacgccattgagcgtcggcgggttccagtaagccgtcacgaaaccagttggcgtggaataatcggtgaagcgcatcatgttgtcccagtcacgctgcttcacgtagttaacgtccacacccagcgcccagctggcatctagcgggcgataaagcagctcggaaccgacaccggcatacatcgtttccagataaccgccatacacctggccatagaaaccattgcctaagtcggcaaagtagttcgcctgcaagttgttgagataaacgtcattgcgaacgtaatcacggatatgcgtgcgcacgcggggcagggtagagtccgcgggtaatagcgaagacttaaacttgtcgtagttattgtaaatattggtgaaaataccgccatcaagcagcaggtggtcagtaaaccagtagcgggcgctggacatcagccccaactggaacatatagaaatcttccgggccgcccagcgattgtgaaagtgttgggttgaaagagtagctaaagcgatcttcacgaatacggtagccccgaccaaaggcagaaagatcttctgcttcaacacgttgttgttgcagttgctctgatttaccaggcgctgtaccagccagctttttgcgcaggctggctacgtcggtttcggtagtcaccatcgccatatgctcgcgcttttgcgtcacgctaatcttctcaacgccttgcggcaggttattcaccagaatccggttggcacgatcgaccgcttcacgagagtcacggtatttgtattgctgaccagacatatacagtgtcttatcgcgtagctgaatttctggcgcgtcaaagcccgcgttatacttcagggcggtaagttggtttgctaccgtggtgtactgcaatccttcagattcaggcgcaggttgatatgccggttttggcgtatcgcgcagggcagggcgcagatcgttgaaattggtccgtaacgtgaagccaaacatcaacgtgttaccgcgttcataactcaggttgagatctgcccagctggcagcgcgataaactgcgccgacgttgaaatggcttgcctgaggcagtttgccagcgaaatcattctggtaattgtttccatcgtattcgagtttcagacgcaggggattccacggcgtttgatattcaatgccgccaaagatggaggctgggccacgaaagatatcgctaaagctgatatcgcccgcatcgtgagactctgcgcgatgacaatatttatcgctcacccggcaaaacgggttggtaatattgcccgcattaccggcgtagccccatgccatcccgagggtgaaatcaaatggccccgcttgcttgctggccaccagatactcactgtcaaaccgacccgtaccagcaatatcacgtttaccaaacgccacttgcggtagccagtaaccttcttcccacaggcgaagtttaaaatcgaatgatttgtctttgtatgactgatcgccgctgaaatcttcccactggctatatttgcgtgtgcgcacatccgtataacgaatggtgccttccagccatgggaacagcgccacggaggtggagtagaaacggtattgatcgttatcccggtagttgacgctgaattcaccttccggtgcgatgcgcgcatttggcatctgcaacaatcctgtgccgccaaagtccgattgcgacgaaccctgcggatccgggtaggttaatacttcagcatgacaggcactggagacggcaatggccaggcagcttaaaagatatgaattcttcttcatcagtcaggaacacgttgcgttaaaacagacacaatctggtcatttaaatcagcatatttttcgggcagtacatgcgcagaaaagcccaaccaaagctggctgccaggcggtggttccacatgtcttttattccacagggcaacaggggcgacgacagtctcaccctcaggcgtaatcaccataacgttattcttgtccgcgcctgcaagacgggggcgatcttgcagataatcggtaacgctacggcctgcctgccagggcaattgcccagccccagaaaccgcacccagcagagtaatagtcaccggacgctgtacggtatagagcgtatagtccccgaccagcgggggattgctgttctcatccactcgtacaaaatcagggtccagtttgaccggtaagcgaccagtgatattgagattgagtaactgctggcgcacggatttaatcgttgccaccacatcgtcgtcagcttctgcttcccaggaagcaagctgtgccatgacatgttggtagtctttaagcgctttagctttcgccgcagagtcggtcagcaaggcaccaggccaccagaggcgatcgcgcagttgcggttgtgtcaccaactggacaacattttccacggggccaacggaaagtgtctgttgttcgccaggcagataaatagtcaccgttccttgcgcaaaggcatggtgtgtcattacgtaaagtacgctggcaatgaaatacgactgtaatttattcatggtgcgggtttaagaaacgtcatttctacgggaataacccctgcgcctaacatttgccgactttgacgaacctggccagtagccgaatcgacccagaatgtgttttgccactgtttttctggcagcgtggaagtcacctcttcctgccagacattacacagcacattgcgacccgcaatattcagcgtctctaatccagcaaaggaaaaagtagaactcagggtcgcagagcgaaaatggttgtcttcactccagagaatatcgcgcgtccagcggctgccatcttttattgccagcgcgttacgcagagggtcctgcccggaatttgtcacttccagcagattattattaagtttgacggtttttaaaagacgtccattgtgggtaaccagcatggcgttatcctgggataaccatttgctttgttcttgttctatatatcccagtaccacaaagattcgttgcccttcattaaggcgtaaatacatcgtggaataaggcaacgcctggatctgctgatccgctacggtgatatcctgattatcgaaaaggctggcgcgaaatgtatcgaccatactttgctggctgtgcgtacatcccgcaagaaatagtgcgaaaatcgataaaataagagggcgcacctttaatccttgaaaggttaattaaaaaaatgcaaatctctaaagcccggtacgaatatcgcaaccgggtatcatttaactttaatttcgacgcgttaaagcagtattagtgtgtagtggacgtggtggttgaggtgttatgagaaccgccatcgccactgtcatttgctgcaacaactgccaacgtcgccacaccaacagccgttgccacaccgacaactgtcgccgtgccgacagcgccagcagccacgccaccagtggtagtagcagtcgtggttgcgccggtagtggtcgttgtggtgccagtagtacccgtcgttgcctcggtcccgtttgttgcttcaggggcagcaaacgcagctggcgtcgtcaacatgaaggccataaggattgcagaaagcttgtgtttcataacttttcctttattcatcgcatggacaatacgtacgcttgagatcaagattgtctactttgagtataacatccttgtgaaatctccctttcctcataccgcttgcactatatactgcgggtaggaaaggcgcgcagagggaaatataagattgttaactatccccctctggaaatacgacttgtgagcataagataaatcttagcaaaatacaaattaaagataaggaaattgttacgaaagctattaattattgttggtaatatagtttcaagtggtactataactggctgttaaatggcatttataactattaggtgcagagatattcgcttaaatggattagtttctttgtggaaaagtaactgatgttataatgtatgatgttgactattgcactattccaataaaaccagtcagctttaaacaagcagcgtcatattaagagagataaacatttgccgctgttggtcctcgcaggccatttacgcggcaaaattccacacgtaatcctggtataagcacttctgcgtcgcggggagtgaatgcggaaatatggacctgaacttctttacgaccgtcagaggggataatgaatcctttgccgcttttgcgatcaaaggttttgacaattcctgtcattttacgggacaaacaaattccttactgaaaatactgcgctgcactatacggggttaataaaataaagccagcgatatttaagaccgccggacggctaaaataaaatttgcttaatctcaattatcatgcgttaatagctgcgtcggtttgaaagacagacagcatacaaagtagtttactaaagcagttctcattatcaggcattatccccttcttttgagtctctctcctgaacactaagtagtttctgtattaaagccctgtttgccgaaaggcccaaaatgaaggaagtaaaatatgtctaataaaatgactggtttagtaaaatggtttaacgcagataaaggttttggctttatcactcctgatgatggcagcaaagacgttttcgtccatttcactgccatccagagcaatgaattccgcacgctgaacgaaaatcagaaagttgaattttctattgagcaggggcaacgtggccccgcggcagcgaacgttgttacgctctaaggttgccgttattactcaacatctccatttccgctgtccatgttgtcatggttcacagtaccgtacatcggcattcgatgtgacggagcgaaaccctttgggcgctaagtgtattttttgtaaatcgacgatgatcacctttgataacgtcgcgctgcaaatacgcacggaccatgcgccgctggatttcacaaaataatatcaggctccctcgtggagccttttttatatctgccttatttttcttcaacgctgtatgtatagtaagcgataacctgttgattattgaatctttcggggagatggcttataacatttcttacctgaccagggtaccgggaaccaacaccttactggcgtgttgctgtcttttaagaccagaagaggttaacagtgaatattgaagagttaaaaaaacaagccgaaacggaaatcgccgactttatcgcgcaaaaaatcgccgagctgaacaagaatacagggaaagaagtctctgaaattcgcttcaccgcacgagaaaaaatgaccgggcttgaaagttatgatgtcaaaatcaaaataatgtgattttgtgaacatcacccgtgcgaggtgatgttccgcttgttgctaatttagtgaccaatcattggcgcttgtggaattaagcgtcggtacaattcatccggtaccgggctttgccatactcccgcatacattgcgtaaccaatcaccgcaaacataatccccagaaccagtagcgtcattaaccagccagacaacgcaaaggcttttttatttgccgcaggtttttgcagtgaaaaggtcaatgttgaggctaccggacatgactctacgcaagtcatacagccggtacattccactgttcgtacctgaattaatttatcgaccgggatccgtgatgggcaattttttgcgcatttgccacagtcgatacaactttcggcattgcgacgaatcttaaacggcgacaatagcgaaaccacgcccatcagcgcgccatatgggcaaagataacgacaccaggcatggcgaataaacaggctggcaatcagcaaaacggtcacgctgattaatgtcgcggtccccatatgacgaaagaaatcgagcattttaacgtccatcaccacgctgtagggcgacaacataaaatagtaaatcgcctgagcgggcatcaataacgcgatatagataaaaaaactcaacagcaaatacttcacgccgcgcagaggaatatccagccagcggggaaggacacattgccgaccaaacagtttgttaccgagatcgccgattaattcagaaagcgtaccaaccgggcataaccatgagcaaaaggcctttttgagtaatagactgatgacgataaaagcgaccaataacagcatcgcggcggcgtggacggacggtaactgacctgttacaaggctatatttcagattcatcagcccggcaatcggtagccagccttcgatacctcccggtctggcgacaaatgtcgtgctacttgccgtttcgtaatagcgcacccaataccagaacgtgatggcaatataaatattcattgccaacagtaataattgcgtcgctttacgccaggtcgtggcattacgccagtcattccacggtaatttgccgcccgtcgtgcctggccgccgctgccagcgggttcttttattctctgccatgattttgccagtccgttaagttgtataccaaatgccactattctagttgttcttaactggctgatattgattcaaatcgcgttcaggtctttcttatgcaaccatgcttccagagcggcaacactgcgtgtaatttcttcgtgtggaaggggggcagataatggctgctgctccagttgtgcgcatagctggctggcgatatgcattcccagactcgagcaactgctttttagctgatgcgcggcacgctttattttctcgctatcctgactggcgcgggcaatgtcgatttcatcgagaagcggcagggcatgttgtgtaaataataccagccattcgtggatcttctccgtccccattaactgagcatcttcattgagttgcgatacatccagcgattgatcattattgacttgcagttggagatagtgcgccagtaactgaccgagcacttcacgcggcaccggtttagggataatcccgcggaataatgaactggtacgctggcgcagcgtttcgtcaatgacatgggcgctaaagccaatcaaaaccagcgacggatattgctgtgccagttgtcgggcaagcgtaatgccgtcgatatccggcagatcaaaatccaccagtgcggcagcaaacggttcgctattttgcagtgtctctaaagcctgcgcggcattgccaacagcaacaatctgcgcaccactggttttcagcatctcaatggtaattcgctgggttagcgggttatcttcaattaacagcaaacgtaaaccgtcaagacgcaccgcctgattgactgtttttggcacgggtgccgtggcaacacgtaacggcaagcgtaaacaaaaacagcttccaacctccggcgtgctggtggcgctcagttcgccgcccatcgcctgggccagacggctactgatagtcagtcccagcccggtgccgccgcgtttgccgcttacctgcacaaatggctggaagatttctgccagtttcgcgggatcaataccgcagccgctgtcttccacttcgaccagccattgctcgccatcagtgcgactacgcaggataatgtacccttcgtcagtaaaacgcagggcgttgctcaacaggttggttataacctgacgaatacgtcgtggatcgcccattaacgcgcacggcatatcatcggcaattgccgttgccaggcgaatcgggcgacctttcacccgtccgctcattaattgcagggtactttccagcagcgggcgcggttcaaagggctcatcgctgaccgaaacattcttgccacctgcttcgatagcggaataatcgagaatatcgttgaggatggtcagcaacgattcaccagagtcagtaattgcccgcaaatcatcacgctgggcgttaagtgcggggttatctgccagcagttgagcagtgccgagaataccgtacagcggtgtgcggatctcatggctcatcgccgccagaaacgccgattttgcctggctggctttttctgcttccgcccgtgcctgtcggtgttctatcaccagttcctgcaattcagctgtacgcgctttgacctgcgccgccagctgttcgcggtggcgattcagtgcatgaacattgctgcgaaacgcatccatcagccgcccgatggtatccagctcccgtacgccagcggtttccgggaaaggggagtcaatatcaccgtccagcagccgttgcagcgcctgcgtttgttcggcaagtggacgcgtgactgagcgataaaccacgcgccagaggatcagaatcagtgcgcaaagtgaaaccatccccagcaataacaggctgtattgcccgcgtgcactcgctttttccagatgcgccagtccgtgctgattacgcagctcaatggtgtcgaccagctgactgacttcgctactaaactgcgcgaactgggcgatgttattttgtgcgagagtttgtaggtgattgctgatttcactgtcctgctgatacagcgccagcaaatcgctatattggctaacggtagttaacgttgttgcgacctgcgcacgaacacccggatcttcaatgcgtatttgccgacgttgcagaattttcaccgcattattgagctgcttttccagcgttggtgcatttttctggatctgctccagccccagattcatcaccatttgctgcacccgcagagcgctaaggcgcagttcattcatctggttaacatactcaagatcgatatcaatcagccgatcgagtgcactttcagcagcctgacgctgatcttgttcgatcaaatcgtaaatcccggcctgggtcgctccagcggaagttgtcgcattattcgcctgaccttgcgccaggcgtgcgatctcatcggcggcagcgactatctgctgactgagttgctgttgttgctggcgcagttgcaaacgctgccccaccagttccccttgctgacgtaacgaacgggagatctcctgctcctgttgttcaatagcggtggtatcaaaaccttgttcccgtaacgcttgcagcaacgcattaatcttcaggctttgtgcggtgagcattcgcccctgcgcctgccacatcttttcgttatcggcactggtcaggttctgcgcggcgaaaagttcccaggcgctggcttcgctcaactggcgcgccatattcatggtaggaatcaatgcctgagtgttgtctttttccacctggctgataaagcgcaggttgtaccatcccaccagggtactggtcagggttaacagcgccatcagggcaaagcccatccagagtcttcgggtcagggttaaattcacggtcggtgcactttaggtgaaaaaggttgagtcgcaaagcggaatgcatctagcataaagccttattattgatgaggctatcatgcgcgtactgctatttttacttctttcccttttcatgttgccggcattttcggctgataacctgttgcgctggcatgatgcgcagcatttcacggtgcaagcctctacgccgcttaaagccaaacgcgcatggaaactgtgcgcgctttatcccagcctgaaagattcatattggttatcgttgaactatggtatgcaggaggctgctcgccgctacggtgtggatttaaaagtgctggaggcaggcggctacagccagttggctacccagcaagcacaaatcgaccagtgtaaacagtggggcgcagaggccattttgctcggtagtagcacgacctcatttcccgacctgcaaaagcaggtagcaagtctgccggtgatcgaactggtaaatgctattgatgctccccaggtgaaaagccgcgttggtgtgccctggtttcagatgggctatcaaccggggcgatatctggtgcaatgggcgcacggtaaaccactgaatgtgctgttgatgcccggacccgataacgccgggggcagtaaggagatggtcgagggttttcgcgcagccattgccggaagcccggtgcgtattgttgatattgcgcttggtgataacgatattgaaatccagcgtaacctgttgcaggagatgctggaacgccatccagaaatcgacgtcgttgccggaacggccattgcggcagaggcggcaatgggggaagggcgtaacctgaaaacgccgcttaccgtggtgtcgttttatctttcacatcaggtgtatcgcgggctgaagcggggaagagtgattatggctgccagcgatcaaatggtctggcagggggaactggcggttgagcaggccatcaggcaattacaggggcaatcggtgtctgataatgtcagcccaccgattttagttctgacgccgaaaaatgccgaccgtgaacatattcgccgctcgctgtcaccagggggatttcgtccggtctatttttatcagcacacatcagcggctaagaaataaccttcaccatgttgcgtcaccagtaaatccgcgctgagtttatgacgtaaacgacgaattaacacatcgacggtgcgcaggtcagggttttccacccgacgcgcagaaagcatacgtagcagacgttcacggctgagaatttcgcccggattcgtcacaaatgccaccaacatttcatactctgcgcgggtcagtttaatcggctcgccatcccgctccagcgtatggcgcgacacattcaggcaataaccggcaaagcgatagcagttgtcctgagtgtgcggttgagcttgtcgcgcgaggtcgattcgccagagcagatttttcacccgtactaccagttcgcgcagttccagcggtttggtgacgtaatcgtctgcgcccatttccagcccaacaatacggtcaatccgatcgctgcgtccggtaaccagaataatccccaccgttgagcgttctcgcagggcgcgggttaacatcaggccattttcatcgggtaagttgatatccagcagaattaaatctaccgactgattctgcataatttcccgtagcccggcaccgctcgccgtaacggaaacggtatacccctcctgagtgaagtaggattgtaatcgcgcctgggtaaccggctcatcttcaacaataacaatgtgatgtggcatcagagggttttactcattctgttcatatctgttcatattctgccgtaagccgttcatcctgaccagtgccgctgttcatatttgctcattaagatcgcttcactaaaccataattctacaggggttattatgcggaaactctggaacgcgctacgccgacccagtgctcgttggtcggtactggcgctggtcgcaattgggattgtgattggcattgcgctgattgtattgccacacgttgggatcaaagtcaccagcacaaccgaattttgtgtcagttgccacagtatgcaaccggtgtatgaagaatataaacagtcggtgcatttccagaacgcctccggcgtgcgagctgaatgccatgactgtcatatcccgccggatattccaggcatggtgaagcgcaaactggaagcgagcaatgatatctaccagacctttattgctcactccattgatacacctgaaaaattcgaagccaaacgcgcggaacttgccgagcgtgaatgggcgcgaatgaaagaaaacaactcggcaacctgccgctcctgccataactacgatgcgatggatcatgcgaagcagcatcctgaagcggcacgtcagatgaaggtggcagcgaaagataatcaatcctgcatcgactgtcataaaggtattgcccaccagttaccggatatgagtagcggcttccgtaagcagttcgatgagctgcgcgccagtgctaatgacagtggtgacacgctgtactctattgatattaagccaatttatgcggcgaaaggcgataaagaagcctctggttctctgctgccggcttcggaagtgaaagtccttaaacgtgacggcgactggctgcaaattgaaattaccggctggacggaaagcgccggacgtcagcgtgtactcacccaattcccaggtaaacgcatctttgttgcctcgattcgtggtgatgtgcagcagcaggtgaaaacgctggagaaaaccaccgttgccgacaccaataccgagtggagcaagttgcaggccaccgcatggatgaagaaaggcgacatggtgaacgatatcaaaccgatctgggcctatgcggattcgttgtacaacggcacctgtaaccagtgccacggcgcaccggaaatcgcccactttgacgctaacggttggatcggcacgctcaacggcatgattggctttaccagtctcgataaacgtgaagaacgcactttgttgaaatatctgcaaatgaatgcgtctgacaccgcaggtaaggctcacggcgataagaaggaagaaaaataatgaacaataacgatctctttcaggcatcacgtcggcgttttctggcacaactcggcggcttaaccgtcgccgggatgctggggccgtcattgttaacgccgcgccgtgcaactgcggcgcaagcggcgactgaggctgtcatctcgaaagagggcattcttaccgggtcgcactggggggctatccgcgcgacggtgaaggatggtcgctttgtggcggtaaaaccgttcgaactggataaatatccgtcgaaaatgattgccggattgccggatcacgtacacaacgcggcacgtattcgttatccgatggtacgcgtggactggctgcgtaagcgccatctgagcgacacctcccagcgcggtgataaccgttttgtgcgcgtgagctgggatgaagccctcgacatgttctatgaagaactggaacgcgtgcagaaaactcacgggccgagtgccttgctgaccgccagtggttggcaatcgacggggatgttccataacgcttcggggatgctggcgaaagctattgccttgcatggtaatagcgttggtacgggcggagattactctaccggtgctgcgcaggtgatcctgccgcgcgtggttggctcaatggaagtgtatgaacagcaaacctcctggccgctggtattgcagaacagcaaaaccattgtgctgtggggctccgatttgctgaaaaaccagcaagcgaactggtggtgcccggatcacgatgtttatgaatattacgcgcagttgaaagcgaaagtcgccgccggtgaaattgaggtcattagcatcgatccggttgttacatccacccatgagtatctgggacgcgagcatgtgaagcacattgcggttaacccgcaaactgacgtgccgctgcaactggcgctggcgtatacgctgtacagtgaaaacctgtacgacaaaaacttcctcgctaactactgtgtaggttttgagcagttcctgccgtacctgctgggtgagaaagacggtcagccgaaagatgccgcatgggctgaaaaactgaccggtattgatgccgaaaccattcgtgggctggcgcggcagatggcggcgaacagaacgcaaattattgctggctggtgcgtgcagcgtatgcagcacggtgaacagtgggcgtggatgattgtggttctggcggcgatgctggggcaaattggcctgccaggtggtggctttggttttggctggcactataacggcgcaggcacgccggggcgtaaaggcgttattctgagtggtttctccggctctacgtcgattccgcctgttcacgacaacagtgactacaaaggctacagcagcacaattccgattgcccgttttatcgatgcgatcctcgaaccggggaaagtgatcaactggaacggtaaatcggtaaaactgccgcagctgaaaatgtgtatttttgccggaactaacccattccatcgccatcagcagatcaaccgcattattgaaggctggcgcaagctggaaacggttatcgccatagataaccagtggacctcaacttgccgctttgccgatatcgtgctgcctgcgaccacgcagtttgagcgtaacgatctcgaccagtacggcaaccactccaaccgtggcattatcgccatgaaacaggtcgtgccgccgcagttcgaggcgcgcaacgactttgatattttccgcgagctgtgccgtcgctttaatcgcgaagaagcctttaccgaagggctggacgaaatgggctggctgaaacacatctggcaggaaggtgtacagcaaggcaaaggacgcggcgttcatctgccagcgtttgatgacttctggaataacaaagagtacgtcgagtttgaccatccgcagatgtttgttcgccaccaggcattccgcgaagatccggatctcgaaccgctgggcacgccgagtggcctgattgagatctattcgaaaaccatcgccgatatgaactacgacgattgtcaggggcatccgatgtggtttgagaaaatcgaacgctcccacggtgggcctggctcgcagacgtatccgttgcatctgcaatctgtgcatccggatttccgacttcactcgcagttatgtgagtcggaaacgctgcgtcagcaatatacggtagcgggtaaagagccagtgttcattaacccgcaggatgccagcgcgcgcggtattcgtaacggtgatgtggtacgcgtatttaatgctcgcggtcaggtgttggcaggagcagtagtttctgaccgctatgcacccggcgtggcgcgaattcacgaaggggcatggtacgatccagataaaggcggcgagcctggtgcgctgtgcaaatacggtaaccccaacgtgctgaccatcgacatcggtacttcgcagctggcgcaggcgaccagtgcgcacactacgctggtggaaattgagaagtacaacggaacagtggagcaggtgacggcgtttaacggccccgtggagatggtggcgcagtgcgaatatgttcccgcgtcgcaggtgaaatcatgaccacgctgacagcacaacagattgcctgtgtttacgcctggctggcgcagttgttctcccgtgaactggacgatgaacaactgacgcaaatcgccagtgcgcagatggctgaatggttttcgttgctgaaaagcgaaccgccgctcactgcggcggtgaacgagctggaaaaccgtattgccacgctgacagtacgtgacgatgcccgtctggaactggccgcggacttttgcggcctgtttctgatgaccgacaaacaagcggcgctgccgtatgcatcggcctacaaacaggacgagcaagagattaaacgcttgttagttgaggcagggatggaaaccagcggcaatttcaacgaaccggcagatcatctggcgatctatctcgaattgctcagccatctgcatttttcgctgggagaggggaccgttcctgcgcgaagaatcgacagtttgcggcaaaaaacactgacggcgctgtggcaatggttaccagagtttgttgcgcgttgtcgtcagtatgacagctttggtttttacgcggcactaagccagttattgctggtgttagtggagtgcgaccaccaaaacagataacgtcgtttgtgcgcctgaaaagacgcgtttagcgtcgcatcaggcattatggcgcagttgccggatgcggcgtgaacgtcttatccggcccacaggaactgtaatctttgtagaccggttaagatgcgtcatcgcatccggcaaacacacatcacggatgagctacaaaccgggaaagccgctggcgcagcaggcggttttcctgcttcaggtgcgcaatatcatccattaacgtcagcgccaccgcgatccccggccagtccagagccagttcatgacgcaggcgtaccgcgcgttgcaccacaatggcggcatggtcgtcaaatacccaggttgtttcctggatctcacgcggttcaaccacccccaaaccgacaatttcattcaactcctcttcagagatgccggtatgcaggcaaaattcggtaatagtaaaagtcaccgtaacattagccattatgctttcccccaatctttacgtggatcaaaagacgactgggcgtctgccagttgctgccacagcgcggcagtgttttcatccggtttcggcggcatcacgatttttagtaccgcatacagatcgccggtctgttttttgctcaccagacctttgcctttaacgcgcaatcgttgcccggcctggctgcctggcgggatagtcagcaaaatgctttctttcagtgttggaacggtgactttagcacccagcgccgcttcccacgggctaaccggcaccacaatttccagatcctggccgacaatatcaaacagcggatgtggcgcaatatgaattaccagccacaaatcgccatttggaccgccgttttcgcccggcgtcccctggcctttcagacggatgcgttgaccattgccgacgcccgccgggatcttcacattcagcgttttcggaatttcctgttcgatcatgccaaaggcgttataaaccggcaggttatagctgatggtacgcttatgctcagtaagcgtttcttcgaggaataccgccacttcgatttcaatatcgtggccgcgtgtggcggggcgttgacggctctggcgggcatgctgaccgaaaattgacgagaagatatcgtcaaaatcttcggcgttaaaactctgaccgtcgccatggtggaactgacggttaaattgcggatcgttgcgatgttgccacatctgatcatactcagcgcgacgttgttcatcacttaacacttcccaggcttcagcgacctctttgaagcgggcttcggcatccggttctttgctgacatcaggatggtatttgcgggcaagtcgacgataggcggtcttgattgtcttgagatcgtccgtcggtttcacgcccatgatggcgtaataatcctttaattccatagcgttatctcgcgtaaatcaacacaaattgaaggaacccctgtaaggtaactcctataagtgtagggtaatcctcaaaatttcatatgccaacacagaatatgttattgaaatcatcgcggagaggaggtcgccatcaagatgggttgctgaacatattttaaacaggtgaaaaagggtgagcgatttttgatagttgaaccaggcactttaagtttaactagggcgtcattatttattaaattttatagacgctatatatgggtagtaatatacatggaattagttgcactgcaaataattatttgaaacaggcctggaacgatataaaaaatgagtacgaaaaaaatcaaacatattcaatcacgctttttgaaaacacactggtgtgttttatgcggttatacaatgaactcagacgtaaagtaaatgaagaggatactccatgtctggaatgtgaatcactagaaaaagaatttgaggaaatgcagaatgataatgatctatcattatttatgagaacattgcgtactaatgatacacaaatttattcaggggtttcaggaggtattacatatactatacaatatgttcgagatattgatattgttagagtgtccttgccgggcagagcttcagagtctatcacagattttaaaggttattattggtataactttatggagtatattgaaaacattaatgcgtgtgatgatgttttttctgagtattgttttgatgatgaaaatataagtgtccagccagagcggataaatacgccgggaatatctgatttggattctgacattgatttgtctggtatatcttttattcagcgtgaaactaaccaggcattaggattaaaatatgctcctgtagatggcgatggatattgtctgttaagagctatactggttttaaaacaacatgattattcatgggcgctggtcagttataagatgcaaaaggaagtttacaacgaattcattaaaatggttgataaaaaaacgatcgaggcccttgttgatacggcattctataatctcagggaagatgtaaagacgttatttggcgttgatctacaatctgacaaccaaattcaggggcagagtagtcttatgtcatggagctttctgttttttaaaaacaattcattgatagttgcttgaataacgaaaaatgtatcctgcatttacccgagtttatatttaatgataacaagaacttgcttgctttagataccgacacgtcggataggattaaagcggtgaagaattttcttgctgttctttcagatagcatttgctcattatttattgttaatagtaatgtggcatcaatctccttggggaatgaatccttttcaacagatgaagatcttgagtatggttatttaatgaacactggcaatcattatgacgtttacctccctcctgaactttttgctcaggcttacaagttaaacaataaggaaatgaatgcgcaactcgactatttaaatcgttatgcaatttaatggcaaaggcatatgctaaaaaccattgttattagtctcacacttttttattggtaaatattgtctctgtattggtaacgccgcagatattctgtttagccacaggtgcaattatcagcggcgtacgcgaggcaggggctaatcaggcatagtttgcgtcaaaccttgcctgtttttgaagatgtatatagaaaaacaggcgttcaacaagccattttgcgaacctgttcccggaaaaaagtcatatttctgtcacactctttagtgattgataacaaaagaggtgccaggaatgaacaaaacgctaatcgccgcagctgtggcagggatagttttactcgcttcaaacgctcaggcacaaaccgtaccggaaggctatcagctacagcaagtgctcatgatgagccgccataacttacgtgcgccgctggcgaacaatggcagtgtgctggagcagtcgacgccgaataaatggccagaatgggacgtccccggtgggcaactcaccaccaaaggtggcgtgctcgaagtgtatatgggccattacatgcgtgaatggctggcagagcaggggatggtgaaatcgggggaatgcccgccgccgtacaccgtttatgcctatgccaatagtctgcaacgtaccgttgcgaccgcacagttctttattaccggcgcattcccggggtgtgatattcctgtgcatcaccaggaaaaaatgggcactatggacccaacctttaacccggtgatcaccgatgattccgccgcattcagtgaacaggcggtggcggcaatggagaaagagctcagcaaactccagcttaccgacagctaccagctactggaaaaaatcgttaactataaagattcccctgcctgtaaagagaaacaacagtgttcgctggtggatggcaaaaatacctttagcgccaagtatcaacaagaaccaggtgtttccgggccgctgaaagtcggcaactcgctggtagatgcgtttactttgcaatattacgaaggttttccgatggatcaggtggcctggggagaaatcaaatctgaccagcagtggaaggtgttgtcgaagcttaaaaacggctaccaggacagcctgtttacctcaccggaagtggcgcgcaatgttgcgaaaccgctggtcagttatatcgacaaagctctggtcaccgatcgcaccagcgcaccgaaaattacagtgttggttgggcacgactccaacattgcctctctgttaacggcgctggatttcaaaccgtatcagttgcatgaccagaacgaacgcacgccgattggcggcaaaatcgttttccagcgttggcatgacagcaaagccaatcgcgatttgatgaaaattgaatatgtgtatcagagtgcggaacagttacgtaatgccgatgcgttaaccctgcaggcacctgcgcagcgtgtgacgctggaattaagcggttgcccgatagacgctgatggtttctgcccgatggataagtttgatagcgtgttgaatgaagcggtgaaataacagaaaactcccccgcgagaagcgggggagtcgctggttaaacgtttttacgttcgatggtctgttcgccccaaaaaagcgaatctttatcggtcttagcaaaggctttgactaacacttcatcactaccttcttcccaaatcttttccgccattttttcgtcgtacccggcgacttcgaaaatggcctcggctatttccggcgacgtattgcgcagagatgcccattcaccgacgtgatgagctttcgcttcttgagttggcatgcgtatcctcctgttgaagattagccgttaagtttaactgccagacctgcgacatattccccttgataacgagcaatagacagttcttcctggctgggctggcgtgaaccgtcaccgcctgcgatggtggttgcgccgtacggcgtaccgccgcgaacctgtgaaacgtcaaataattcctgcgctgcgtagccaatagggacaattaccatgccgtgatgcgcaagggtcgtccaggttgaagtaatagtttgttcctgaccgccgccagtaccggtggaactaaagacgctcgccagttttccgtatagtgcgccggaagcccacaggccgcccgtctggtcgaggaaggtacgcatttgaccggacatgttgccaaagcgggtaggtgtaccaaaaataatggcgtcgtaatcggccagttcttgcggggttgcaaccggtgcagtttgcgttttaccgcctgctttttcaaataattgcggcggcatggtttccggtacacgcttaacgacaacttctgcgccatccactttgcttgcaccctcagcgactgcgcgtgccatcgtttcaatatgtccgtacatggaataataaagcaccagaactttagccatttctaaccactcctcgtgttatctctattccgtagcgattcgctaccacttatttaaagataagacgtccttttcagagtgcaaatttcacaaccacttatttgatttataacaactttcacaagcacgtaattttgtcgcaaaatgacacatttttatctcatcgcgtttttttaatcataagagcggcttatggataattattggagatgatatctattctcgctaagaagctgttgcaggatattaccaaacgcgggtctgcccgcgtcagttcactaagcttagtcccacgtagcgaaaatatggcagccgccatacgccgcgttaattctatgcaatatgatgtctatacccagacggaggtcagtaatggcaaaccatcgaggcggttccggcaattttgcagaagaccgcgaaagagcatcagaagcaggtaaaaaaggtggacagcacagcgggggtaatttcaagaatgacccgcagcgcgcatctgaagcaggtaaaaaaggtggtaagagcagtcacggcaaaagcgacaactagccgggctaatcaatgacgaatgcatttttgtctgtagctcgtcaaaaagccatcaccgccggttacccggtggttgatactgatgacaaatgtaagcttgcctgatgcgcgatgcttatcaggcctaccagaagattgcaatatattgaatttgcactgttttgtaggccggataaggcgtttacgccgcatccggcatgaacaatgcgtacgttgtcaacaatctgcaccgccgggtaatcccggcggttttctttttatggctcctgatgaacaacttctggcggtggaacgtcaaccaaccttctgcttaataacgcattgagtaaaatcgcgccaaaggttgctgtaccaatccctcccaacgtaaaaccgcccagcgtgagagcaaaatcacccgcgcccagcactaaggttactgcgaccataatcaaattaccgttctggcttaaatcgacacggttttgtacccagatccttgcgcctgcgacggcaatcagcccgaacacaacaattgatgcaccaccaatcaccgcggccggaatggtatgaatcagcgcgccaaatttcggtgaaaagcccaacagcatggcgatgacggcagcagcgacaaacaccagcgtcgagtagacttttgtcacggccattacaccgatattctcggcgtaggtggttacgccgctgccaccgacagaaccagaaagcatcgtcgccagcccatcaccgacgaatgcccgtcccatatatggatccatattgcgtccggtcatcccggcgactgccttgagatgacctaagttttccgccaccagaatcaccgccacgggcgcaatcagcatcattgcctgaccattaaaagcaggagtggaaaaatgtggcagaccgaaccaggcagcatggctgacgagagtataatcgacggcttttcccagccctaaaacgttggtcatcacgccatacagcagacaggcgacaattaatcctacgagaatcaataaccgctggatcatgccacgggtaaacaccgccaccagcccaatacacagcaccgtcattaccgccatccagctatcaaaggccgaagccgatacacttttcactgcgataggcgctaagttcaggccaatcgccatcaccaccgcacccgtcaccaccggcggcattagccgttcaatccagcgtgtaccaattttcatcaccaccaggccaatgacggtataaaccagcccacaggcgataatcccgcccagcgcgatgctgatattcgggttcatgccctgaccgttaaagcccgtcgcggcgatcaccacgccgacaaaagccgcgctggagccgagataactggggacgcgcccgccggtaataaagaaaaacagtaacgtgccgatccccgacattaaaatggaaagattgggatccagccccatcagaatcggcattaacaccgtcgcgccaaacatcgccaccgcgtgttgaacgcccattattgccgtctgagcaaacggcaatcgttcatccggcgcgaccacgccgctctctgtagaggtcgattttaactgccagtgaggaaaaccgaacattgccatcagctgtctccttaaggaggttaacaagcagggcgcatcagcgcgtgataactgcgatcgaaccacaccagcccgtagggtgtggcgtgacgatgaatcgcttcgatggcacaaaacaaaatgtcgtgggtgccgacgctcaccacctggctgatacggcagtcaaacgaaaccagagcctcttccagttgcgggcatccggtcacacccgtctgccagcgggcggcggcaaagcggtgttccatgggcgttttgccgccaaaaagatttgaaagtggctcctgcccggcgctaagtgtatttacacacagcgttcgattttcattgaataccggccagacggacgccccacgattcaggcacaccagtaatgtgggcggcgtgtcggtcacgctgcagaccgcgctggcggtgaacccggcgcgcccggctggaccatccgtggtgatgatattgaccgccgcgcccatacaggacatcgcatcgcgaaaggtttgttgatcaactatgttcatagtttgctccttacaacagcccgcaggcttcttcaaaggacagacgtggcaggcgcgcataaagtttgctgttatcgccatagccgatgttaatcagcagattgctcttcagcgtgctgcctgcaaaaaaagcgtcgtcaacgtattgacggttaaaacccgacatcgggccggtatccagccccagcgcacggcaggcgacgatcagataagccgcctgcatggaactgttgcgaaacgctgtttcttcggcaagttgtgggctggaggtaaaccaactgcgggcatcaccgtggggaaacagtagtggtaaccgttcataaaattcactgtcccaggcgacgatagcggtgacgggcgcggtcagggttttttgcagattgccgctggaaagcgccgggcgcagacgttcttttccttctgcagtgcggataaacacgatccttgccggagaacagttagctgatgtcggcccccatttcatcagggcataaagctcccgtaacgtctcatcgctgacgggtgtctcccgccagccgttgtgagtgcgggcatcggtgaacagggtgctaagcgcacctgggctaacggcttcgttcatagcaattccttacagggcggcttcacggtgatgtaacaggctggcaagcccgttgagtaacagagcattaaacgtttcgggatcggtcacgttgcaggcgtgtccgccatagcgcatcaccattttctggctatcgggcagggcggcatgaagttcactggaacatgctgatggcaccagcagatcatcactggcgcagatgatttgcatcgggcagcggatgcgatccgcatggtgactaaagtcagcgcgtttgagggcgttaagtcgacgcagtaaattatttttgccctgaaaatgcgccagtgccagcgcgtcttctgcctcaaggcgaggtgcgcgggccgccatccagtcggcgggatagaggaacaacggctgcgcttccacccatgcctgcgcgccgccgctatacagtaatcgttcgcgaacctgaaaacagcggcgcgtatgggcgtttattcgtagccagccgttaacgctgaccagcacagttaccgacgcgggataatccagcgccagctgcattcccaccagcgcaccgagcgcatggccgaccaccgcgtaacgctcaatccctgcggctaccagtgcctgatgcagttctgctgccatctgggcgatactgtaatcttctgccagcgtgtcgggattattgccggtaccgcgctggtcgtaacagactacctgatactcctgctccagcactgccagttgcggtaaccagtaactgccgctaccgccaagacccgaaatcaacaccactacgggcgcatcagcataagggggaggtgagagtgaaagtttcatcgcggcctcacttggcgatatgcgcaattgtggcgatttccaccagcgcgtcaggttttaccagtccgcactgaatgcagaatcgcgccggtttatcacccggaaaaaactcggcgtagatttcgttaatcgcggcgtaatttttccagtcggtaataaagatgctgttgaaggtcacatccgccatcgtgccacccgccgtctcgatcaccttgcggatggtttccagaacgtggcgggtttgcgcctttgggtcatcggcaaacagcatgttattatgttgatcaaaagccagcgtaccggagacatacaccactccatcagccagcgtgccgggaacgaagggggccagcggtgcgctgctgccagcgggaataattacggattttggcatcgttaaactccttaagcgatacgagcaaaggacgtgggagaaagcgcgtcgcagaacgtttcgacgtcgctgacccagccaaaaaaggtttcgatattgaacaacgcagctttctgcgcaaattccggccccgcctggtgagttgcgtcttccagcaccacgccgaaatactccagaaaaaagccgtcgcgtagcgtcgattcgacgcagacgttggtagcgataccggtgaaaaccagatggcgtattccacggctgcgcaaaatgctgtccagcggcgtattgaagaaaccgctgtagcgcggcttcggcagcacaatatcgccaggctgcggcaccagttcatccaccagttgataatcccaggagcctttcgccagcaatttcccctgcagctgcggctgcttacgcatggttttcagggcgttcgatttatgaaaattcggtgagccgggtccgccagcttcgacatactgttcatcccagccattttgaaaccagatgatcagcatccctgccgctcgcgctgcggtcacggcggtttgaatgttggcaatgaccgggcgagtggttgagacatcaaacccggcgagatctaagtagccgcctggcgtggcataagcgttttgcatatccaccacgatcagcgcactttgctgcggatcgaaggtaatggcttccggtcgagcggttaaggtcgtcatcatgccacctcctgagtcagcgcagggagatgggcgcggcactgcatcagtggttgaatgcgctcgccgaaggtttcgattcccgacagaaaatcatcgaaggttaacagcacgccttcggcaccaggcacgcttgcgacttcatctaacatgcgcgcgacactggcgtaagaaccgactaacgtccccatattgatgtttaccgccgaagtgggatcggccatctgacggacgttggtatcagtaccggagcgggtatctttctgactttgttcggttagccagcttaacgcctcttcatccgcgcccgctttgtagtgttcccatttggcgcgagcggcatcgtcggtttcatcggcaatcaccataaacaatacataagagccaacgtcgcgcccggtttgctctgcggcctgtttcatccgcacagcggtcggggcgaaagccgtgggtgtatttacacctttgccgaaacagaagttgaaatcggcatactgggcggagaacgccatgccagcgtcgctttgcccggcgcagatcactttcatggggacactcggttgcggactgacgcgacaatcattcatggtgaaaaaatcgcctttaaaatcgcttttccccgtgccccacaggtcgcgcagcacctgaacatattcggtgagatagtcgtaacgacgggagaaatagtcatcgccaggccagatacccatctgctcatactcgggcttttgccagccagtcacgaggttgacgccaaaacgcccgccagagatggagtcgatggttgcggccatacgggcgacgattgccggaggtaacgttaaggtggcagctgtcgcgtaaatctgaatgcgcgaggtcacggctgccagccccgccatcaaggtgaacgactcaaggttgtgatcccagaactcagttttgccgccaaagccacgcagtttgatcatcgacagggcgaaatcgaaatggtagtgctccgctttttgcacaatggctttattcagttcaaaggtcggcatgtactgcggcgcgtgggtcgaaatgagccagccgttgttgccaataggtacgaatacgccaattttcatcatcaacctctcttcgtctcgtaaagtgaaagtcagacggggcgctgcatcctgcatatccttttcagccgcgtattggcttgtttgcaaagcggatgccagtttttaaaaagtgaatgttattaatgtgttaatgtttggttatataaaatatctggaaaaaagtggactaaacggtcaaaacagttgcacataaaacatgcatccgtgcgcgatgagagtgcagaaggtcgaggccgggcgggggttttgctatcctgttgccaatctacaagaggggagagcgcatgacgcaaggcgcagtgaaaacaacgggtaaacgttcgcgcgcagtaagcgcgaagaaaaaagcgattcttagcgcagcactggacactttttcacaattcggttttcacggcacacggctggagcagatcgcagagttggcgggtgtttcaaaaaccaatctgctgtattactttccgtcaaaagaggcgctgtatattgccgtgctgcggcagattctcgatatctggctggcaccgttaaaagcgtttcgtgaagatttcgccccgctggcggcgatcaaagagtacatccgtcttaagctggaagtctcacgcgattatccgcaggcttcacgtctgttttgtatggagatgctggcaggcgcgccgttgttaatggatgaactgacgggcgatttgaaggcattaattgatgagaaatcggcgctgattgccggttgggtcaaaagcggcaaactcgcgccgattgatccgcagcatttgattttcatgatttgggcttccactcaacattacgccgatttcgcccctcaggtggaggcggtgacaggcgcgacgttgcgcgatgagatatttttcaatcaaacggttgaaaacgtgcagcggattattattgaggggattcgaccacgttaaagatgccggaggaggttgtaacatcctccggctacctgtttaaccgatcgtcattaaactggcgttaccgccagcggcagcggtattcacactcagcgaacgttcgatatacagccgttccagaaggatattgctttcgccacgggcaaaaccctgcaccgaaacaattgcgccatcccgcgcagcaacggcttcacacaatgcgcgaagctgatccgaatcaccgtggaagatcaccgcatcaaagggttgagcggttatattttccgctttcgccagttgaatacgttcgctgactgccgatggcaatgcctttactagctgacgatgcagcgcgtcatccggccacagtacctggctgcccaccgccagcacggcggcgagctgagtcagcgcatcctgctcatcatcggcaatacacaacacgcgctcacgcggcagcagcgtccaggtgttgcgttcacccgtcggccccggcagcaatcgttgtgttcctgcctgcgccagctcgccatattgcgtacataacgcctgcaattctggacgatttgctgcccattcccgcagtgcatttagcggctgagtcaatgcggctttcaactgtgcatcgaccggatactctgcatcctgacgcgcgagcgtcactgccagcgcactttccgggcgattcgccagcagacggtagagatagagcggaccgcctgctttcggcccggtaccggacaacccttcgccgccgaatggctgcacacccaccactgcgcccaccatattacggttaacatacaggttaccaacatgggccgagccagtgacctgggcgatggtttcatcaatacgcgtatggacaccaagcgtcagaccatagccggaagcgttaatctgctcgatcagctctggtagctggttacggttgtaacgcaccacatgcagcaccggaccaaagacctctttttgcaattcggcaaagtcatccagttcgatcagcgtcggggcgacaaaggtgccgctttgccattcacgggcatcttcgctgttttcccgcaccgcctggaacaccggacggcctttgctacgcatggtctgaatatggcgctcaatattggctttcgcttcgctatcaatcaccggaccgatatcggtggtcaggcgacccggattacccatccggcattcggccattgcgccgcgcagcattttcaacgtgtggtcggcaatctcatcttgcaggcacagcacgcgcagcgccgaacaacgctgacccgcactgtcgaacgccgaggccagtacatccacgacgacctgttcggtcagtgctgaagaatcgacaatcatcgcgttcatgccgccggtttcagcgatgagcggaatagggcgaccctgagcgtccaggcggctggcgatattgcgctgcagtaacgtagcgacttcggttgaaccggtaaacatcaccccgcgcacgcgatcatcacccgtcagttgcgcgcccacggtttccccctgacctggcagcaactgcaccacgcctggcggtacacccgcttccagcaaaatggcgatcccttgcgcggcaatcagcggcgtttgttctgccggttttgccagcacgctgttacctgccgccagtgcggcagcaatctgcccggtgaaaatagccagcgggaagttccacggactgatacacaccacaggccctaatggacggtgggtttcgttagcgaaatcatcccgcacctgtccggcatagtagtggagaaaatcgaccgcttcgcgcacttcggcaatggcgttactgaaggtttttccggcttcacgcaccagaataccaatcagttgctgcatctggctttccattagcacggcagcgcgatgtaaaattgccgcgcgttcagccggaggagtggcaaaccagattggcgcgttattaaccgcactttccagcgcctgttctacttcacgcggcgtggcttcacgcacatagcccacaatatctttcggttctgcagggttaataacgggcgacatctcacctgccgctaccggttgttccagcattggcaaggcctgccatttttgcagtgcactattgagcagggcagaagagagcgaggccagacggtgttcgttagcgagatccagccctgccgagttgtcgcgcccgtgaccatacagatcgcgcggcaggggaattttcggatgcggtaatccagtttgcccttcctgttgcgccagtttttctacagcagtgaccggatcggcgaccagttcatccagtggcaaagaggtgtcggcaatacggttaacaaacgaggtgttagcaccgttttccagcaggcgacgcaccagatacgccagcagcgtttcatgtgtgccaaccggggcataaatacgacacggacggttaagtttgccgtcggcaactttcccggtgacctgctcatacagtggctcgcccataccatgcaggcactggaactcgtactgacccggatagtagttctgacctgccagttgataaatcgccgccagcgtatgggcgttgtgcgtcgcgaactgcgggtagattagatttggcaccgccagcagctttttcgcacaggcgagatatgaaacgtcggtatacaccttgcgggtataaaccggatagccttcaaggccgtccatctgcgcacgcttgatttcactatcccagtacgcgcctttcaccaggcgaatcatcagacggcgacggctgcgggtggcgagatcaaccagataatcaatcaccaacgggcagcgtttttgataagcctgaataacaaaaccgatgccgttccagcctgccagttccggctcgaaacagagtttttccagcagatcgagggagatctccagacgatcggcctcttcggcatcgatgttaataccaatatcatactgacgcgccagcagggtgagtgatttcagtcgcgggtaaagctcttccattacccggtcatactgggcgcggctataacgcggatgcagcgccgacagtttgattgaaatgcccggcccttcatagatgccacgaccgttagacgctttaccgatggcgtgaatcgcctgctgataggaaaccatatacgcctgtgcatctgcggcggtcagcgcggcttcgcccagcatatcgtaagagtaacggaaacctttctcttccagcttgcgggcattggctaacgcttccgcgatggtttcgccagtgacgaactgctcgcccatcaggcgcatcgccatatccacacctttgcggatcagcggttcaccgcttttaccgataatgcggttcagcgagcgggagaggctggcttcgttatgggtggaaaccagtttgccagtaaacagcagcccccaggtggcggcattaacaaacaaagacgggctacgaccaatgtgtgattgccagttaccgttgctgattttgtcgcgaattaacgcatcacgggtggctttgtcgggaatacgcaacaacgcttccgccagacacatcagcgccacgccttcctgcgatgacaacgaaaactcctgcaataacccctgaaccatacctgcgcgaccactggcgtttttttgattacgcagtttatcggccagttgatacgccagtttgtgcgcctgttcagcaactggctgcggcaggcgggcttgttccagcagcatagaaaccgcttcggtttccgggcggcgataggccgctgtgatcgcggcgcgggaaaccgactggggcaaaatttgctcggcaaagtcgaggaatggttggtgtggttcctctgccggagtcggtgcttcatcgctctcattggcagcgccagaaagcagcgcaggtagctccggcagagtatcgctgttttccagttgttcgagataagaaaaaatcgcctgcttaattaaccagtgtggcgtgcgatcgatacgtgtcgcggcagacttaatacgctcacgcgtcgcgtcgtccagcttaacccccatggtggtggttcccatgccattactcctgttgttctgaaaggtgcaacttaacgttatcgtgaaatatccatgatgttgcaactttgtgcaaccatgttaaatgtgacctgcgtagcaagcttaaaaatgaatgaaatgttaataaaagaaatcgatatgacagggattaaaaaaataactcagactttttctctgcggcagttaacatttttgaaaggtgcaaccgcaaaaaatgtgagagagtgcaacctgatgaaaaatagtgtcgctgagcactaaaatttaatgtaaatggtgtgttaaatcgattgtgaataaccagcgcttccggcaggatacggtcgccctggtaaaacataaactctgttaccccgttccggtggcagatataacggcaagtttcgacattgccgataataattttttggagactttagatggctattagcacaccgatgttggtgacattttgtgtctatatctttggcatgatattgattgggtttatcgcctggcgatcaacgaaaaactttgacgactatattctgggcggtcgtagtcttgggccattcgtgacggcattatcggcgggtgcgtcggatatgagcggctggctgttaatggggttgccgggcgcggtttttctttccgggatttccgaaagctggatcgccattggcctgacattaggcgcgtggatcaactggaagctggtggccgggcggttgcgtgtgcataccgaatacaataataacgccttaacattgccggattatttcaccgggcgctttgaagataaaagccgcattttgcgcattatctccgcgctggttattttgctgttcttcaccatttattgcgcttcgggcattgtggcaggcgcgcgtctgtttgaaagtacctttggcatgagttacgaaacggctctgtgggcgggagctgcggcgacgatcctttacacctttattggcggtttcctcgcggtgagctggactgacactgtacaggccagcctgatgatttttgccctgatcctgacgccggttatcgtcattatcagtgtcggtggctttggtgactcgctggaagtgatcaaacaaaagagcatcgaaaacgtggatatgctcaaagggctgaactttgttgccattatctcattgatgggttgggggctgggttacttcgggcagccgcacatcctggcgcgttttatggcggcagattctcaccacagcattgtccatgcgcgtcgtatcagtatgacctggatgatcctctgcctggcaggggcggtggctgttggcttctttgggattgcttactttaatgagcacccggcggtagcaggcgcggtaaaccagaacgccgagcgcgtgtttatcgaactggcgcaaattctgtttaacccgtggattgccgggattctgctgtcggcaattctggcggcggtaatgtcaaccttaagttgccaactgctggtgtgctccagtgcgattaccgaagatttatacaaagcgtttctgcgtaaacatgccagccagaaagagctggtgtgggtagggcgtgtgatggtgctggtggtggcgctggtggcgattgcgctggcggcaaacccggaaaaccgcgtgctgggcttagtgagctacgcgtgggcaggctttggcgcggcgtttggtccggtggtgctgttctcggtgatgtggtcacgcatgacgcgcaacggtgcgctggcggggatgatcatcggtgcgctgacggttatcgtctggaagcagttcggctggctgggactctacgaaattattccgggcttcatcttcggcagtatcgggattgtagtgtttagtttgctgggtaaagcgccgtcagcggcgatgcaaaaacgctttgccgaggccgatgcgcactatcattcggctccgccgtcacggttgcaggaaagctaagggacttagcctgcggcggttttgtttggcttcagcagcgggttgcgctcccttaatgtgcctcgccatataaattgaatggtgcagggagcgcgcagggggcggccaatcgccgcggccccctgcaccccgggctctggcgaacaaaatcgccgctgcgcggtaccttcagcttatccccttcggctaccgggtcgggcgcgaggtaacgtcctgtaagacgcgccctcagcccacatccatgtgggctgccccggccttcggggaacgcttcagcgattttgacgccaccaacacccgcgctgttcttatgttccgggcaaaaagttagatttgataatcgaggatggacgaaattgcttgatacacccgcttatcagttttacatggaagttttgatgtattgagtcaggacggttttgtcggctggatacggcgtttacgcggcatccggcaagaacacatggctcgttgtaaacaatcccatctttgtacctggaataatcgtttatatcccctggcattacctctctttgtttacatttcaacatcattttataaacattccgcttgtatttttctttaccgtaatgataatcgctatcactgcgatttacttttctttgcatagattgactcagaaaaacgtttaagggtgggtggcatgtttgttccgtttctcattatgttgcgcgaaggacttgaagccgcgctgattgtcagtttgattgccagctatcttaagcgtacccagcgaggccgatggattggtgtgatgtggattggcgtgttgcttgccgctgcgttgtgcctgggcttggggatcttcattaacgaaaccaccggcgaatttccgcaaaaagagcaggaactgtttgaaggtatcgtggcggtgatcgccgtggtgatccttacctggatggttttctggatgcgcaaagtgtcgcgcaacgtcaaagtgcaactggaacaggcagtcgatagcgcattgcagcgtggaaatcatcatggctgggcgctggtgatgatggtcttttttgccgttgcaagggaagggctggagtcggtctttttcctgctggcggcatttcaacaagatgtcgggatctggccgccgctgggtgcaatgctcggtcttgctactgccgtggtgctcggcttcctgctctactggggcggtattcgcctcaatcttggtgcattttttaaatggaccagcctgtttattctcttcgtcgccgcagggctggcggctggtgccattcgcgcatttcatgaagccggattgtggaaccactttcaggaaatcgccttcgatatgagcgcggtcctctcaactcactcgctgtttggcacgctgatggaagggatttttggctatcaggaagcaccgagcgtcagcgaagtcgccgtctggtttatttatctcatcccggcgctggtggcatttgccctgccaccacgcgcaggggcgacagcgtctcgctccgcgtagcaaatacgacgcaaactcttgcttagttacaacatactttaaagggatagtctcgtcatgaccattaacttccgccgtaacgcattgcagttgagcgtggctgcgctgttctcttctgcttttatggctaacgccgctaatgtgccgcaggtcaaggtgaccgtgaccgataagcagtgcgaaccgatgaccattacggttaacgccgggaaaacacagttcattattcagaaccacagccagaaggcgctggagtgggagatcctcaaaggcgtgatggtggtggaagagcgggaaaatatcgcccctggctttagccagaaaatgacggcgaatttacagcctggcgaatacgatatgacctgcggtctgctgactaacccgaaagggaagttgatcgtcaaaggtgaggcaacggcggatgcggcgcaaagtgatgcgctgttaagtcttggtggtgcaattactgcatataaagcgtatgtcatggcggaaaccacgcagctggtgaccgacacgaaagcctttactgacgctattaaagcaggcgatatcgaaaaagcgaaagcactgtatgcgccgacgcgccagcactatgagcgcatcgaaccgattgctgaactgttctccgatctggatggcagcattgacgcccgtgaagatgattacgagcaaaaagccgccgatccgaaattcaccggtttccaccgtctggaaaaagcattgtttggcgacaacaccaccaaaggcatggatcagtacgctgaccagctttataccgatgtggtcgatttgcaaaaacgcatcagtgaactggctttcccaccttcaaaagtggtcggcggtgcagccggactgattgaggaagtggcagccagcaaaatcagcggtgaagaagatcgctacagccacaccgatctgtgggatttccaggctaacgttgaaggctcgcagaaaattgtcgatctgctgcgtccacaactgcaaaaagccaacccggaactgttggcaaaagtcgatgccaactttaaaaaggtcgataccattctggcgaaataccgtactaaagacggttttgaaacctacgacaaattgaccgatgccgaccggaatgcactgaaaggaccgattactgcgctggcggaagatctggcgcaacttcgcggtgtgctgggattggattaagcattatgcagtatgaagataaaaacggcgtgaatgaaccgtcacgccgacgtttactgaaaggcattggtgcgctggcgctggcgggaagttgtccggtcgctcatgcacaaaaaacgcaaagtgcgccgggtacgctttcaccggatgcacgcaatgagaaacagccgttttatggtgagcatcaggcagggatcctgacgccacaacaggccgcaatgatgctggtggcgtttgatgtgcttgccagcgataaagccgatcttgagcggttgtttcgcttgttgactcagcgttttgcttttctgactcagggcggagcagcaccagaaacgccaaatccgcgcctgccaccactcgattccggcattcttggcggctacattgcgcccgataatctcaccatcacgttatcggtgggtcactcattgtttgatgagcgctttggccttgcgccacagatgccaaaaaagctgcagaagatgacgcgtttccccaacgactcgctggatgcggcgttatgtcatggtgatgtgttgctacagatttgcgccaacacccaggacacggtgatccatgcgctgcgcgatatcatcaaacacacgccggatttgctcagtgtgcgctggaagcgggaagggtttatttccgatcacgcggcgcgtagtaaaggcaaagagacgccgattaatttgctgggtttcaaagacggcactgccaatcccgatagccagaatgataagttgatgcaaaaagtggtgtgggtaacggcagatcagcaggagcctgcgtggacaatcggtggcagctatcaggcagtacgcttgattcagtttcgagtggaattttgggacagaacgccgctgaaagaacagcagacgatttttggccgtgataagcaaaccggtgcgccgctgggaatgcagcatgagcatgatgtgcctgattacgccagcgacccggaagggaaggtgatcgcgctggacagccatatccggctggcgaatccccgcacggcggagagtgagtccagcctgatgctgcgtcgcggctacagttattcgttgggggtcaccaactccggacaactggatatggggctactgtttgtctgttaccaacacgatctggaaaaaggcttcctgacagtacaaaaaaggctcaatggcgaagcgctggaggaatacgttaaacctatcggcggcggttatttttttgcgctgccgggggtgaaggacgcgaacgattatttcggaagcgcgttattgcgggtttaatgtttttaggcggataaggcatttgtgcgcagatgcctgatgcgacgcttgcgcgtcttatcatgcctacaatcagtgcgggtttggtaggctggataaggcgttcacgccgcatccggcgatcgtgcactgatgcctgatgcaaatcctgctgaaagcacacagcttttttcatcactgtcatcactctgtcatctttccagtagaaactaatgtcactgaaatggtgttttatagttaaatataagtaaatatattgttgcaataaatgcgagatctgttgtacttattaagtagcagcggaagttcccggcagtgatagtcagtcactatggagatcgcggatggtaacgtcctgtactggacatgttttagataatcaacgcgccaccactcgcggagttttctcctccggtagtcatctcgtcactttgcattttcaacctcatcctttcttttcatgtgttaccgacgccgtaaatggtgcgcgtagccgtttttcggcattttatccaaaagcaaactatggcttacaaggaagccaaccctctgatgttcgtgcgcataatcgcgctgccaacggcgcgtgtgatgaatacaaacaactcaaggtgctctccatgggaagacaaaaagcagtgatcaaagctcgtcgcgaggcaaaacgtgtgctgagacgggattcgcgcagccataagcagcgtgaagaagaatcggtcacctcgcttgtgcagatgggcggcgtagaagccattggtatggcccgcgacagtcgcgatacttcgcccatcctcgcgcgaaatgaagcgcaattgcactatctgaaggctattgagagtaagcagctgatattcgccacgggcgaagccgggtgcggaaaaacctggatcagcgcagcaaaagcggcagaggccctgatacataaggatgtcgacaggattatcgtcacccgtccagttctgcaagccgatgaagatcttggcttcttacctggagatatcgcagaaaagtttgctccctattttcgcccggtctacgacgtgctggtccggcgcttaggggcttcctttatgcagtactgcctgcgaccggaaatagggaaggtggaaattgcgccgttcgcctatatgcgtggacgtacctttgaaaatgcagtcgtcattcttgacgaggcgcagaatgtgactgccgcgcaaatgaaaatgtttttaacccgcctcggggagaacgtgacggttatcgtcaacggtgatatcacccaatgcgatttgcctcgcggcgtgtgctccggattaagtgacgcgctggaacgtttcgaagaagatgaaatggttgggatcgtccggttcggtaaagaggactgcgtacgttcggcactttgccaacgtacgctgcatgcctacagttaagtgtgttatcggtgcagagcccgggcgaaccgggctttgttttatttcaacagattttcacttcaggttagcgttcaggggggcgactttgagcgtgttgataagctgaactggagtctggtttagatactcttaccaggcatttttcgtcatagcatcagaccagtgtaatactgccagcgcggagagtttttcttccagaagccaaaaaaatgagcatctgcctatcttttttcggccattcaacctgtacaggagatctggtgccaattttgcttatgaggtttaatcaacaatgggccataatttgcctgactgattaacactgaatatattcctctgatttattctttagggataatattataaatgtaaggttaatcttaattaattcttttggctaatattgtgtgttgttattttttttgtggaaggcaagctgcaatggcaaaatagggatggttgtaataatcaaaacatgatactaactatatattgatcgttgcattgttggcatgtaacacgcttcagcgagtaacattggtaatgaaatataatcaacatggataggtgaaaattaattatgagctttatggcttttgtaacttgtttgacaattgcatttatcgccggttttgctgttgccagaaaattgacactccgaaaagttgcctcatcggtaatcatcgctaaatcgcaaccagtcccttcatctgcaacttcccctgccgctaaggcgtcgacaaggagctatataccgcagaaaacctatcgtgactctcgttggcaagagcgagatgagttatttcagggaatggttgccgaaggtattttattggaaagaaaagagtggttaatcacgcgttgtgaaaaaatgtatttcgataatctggaaaaatggtttggacactattgtcatatccattgccaggtctctctggggcgcttgatcaactttccagaacaacctgagtttagcgaagaagaaagaaagcgtttctttgcaatttataatggcatggcaatggattatgttctggtttcaaagaagaacaataaaatagtctgtgttattgagctggatgacccgagtcatgaaagggcggatcgcattattcgtgaccgttggttggatacgattatgactcttgcacgggtgccttttgtacgagcttctgtcactaaattggaggaaatccctccggtctgggagactcgtgacaaaattcgcccattagtcgcggcgacaaagagtgaaccgttgcattaactaagtatcccggtcggggcttctcatccccccggtgtgtgcaatacacgaaaaaaaagcccgtactttcgtacgagctcttctttaaatatggcggtgagggggggattgactcgcttcgctcgccctgcgggcagcccgctcactgcgttcacggtctgtccaactggctgtcgccagttgtcgaccccggtcggggcttctcatccccccggtgtgtgcaatatacgaaaaaaaagcccgtactttcgtacgagctcttctctaatatggcggtgagggggggattgactcgcttcgctcgccctgcgggcagcccgctcactgcgttcacggtctgtccaactggctgtcgccagttgtcgacccccggtcggggcttctcatcccccccggtgtgtgcaatatacgaaaaaaaagcccgtactttcgtacgagctcttctttaaatatggcggtgagggggaccgcctgaaataaatctgacttaatccaggggtgttatataatttcattataaacaatgtattacactttttgttgtccgatattatctaatgtattcttagtgaagcgagagactaatggcatactggatggcataccagagtgacgggaattagcgtatggcagtattgacggatacgaaagcaagacatatcaaacctgatgacaaaccattgccccatgggggaattaccggactgacccttcatccttcttcagtaaaggggcgggggaaatgggtttttcgttatgtaagtccggtgacacaaaaaagacgtaatgctggattgggaacttacccagaggtcagtattgctgaagctgcacgtactgcccggataatgcgagagcaacttgctgcaggtgatgatcctctggagattaaaaaggctgaatctgagaaagtcgctatcccaacatttgccgatgcagccaggcgtgtacatgcagaactgtctcctggatgggaaaatccaaagcatgtaaggcagtggttatcgacgcttgagaattacgcgtttcctcaactgggagcaaaaacgctggattcgattacggctgcggacgtggcagaaacactgcgtccagtctggttaaccttgtcagaaacggcaagccgggttaaacagcgcattcatgttgttatgcagtggggatgggcgcacggtttttgtgtagcaaatcctgttgatgtggttgaccatttgcttcctcagcagacaagaggacgtgatgaacaccaacccgcaatgccctggaggcagttaccgctttttgtggcgaccagtgtgtataccgatgaaccttataatgttacccgcgcactgttattaatggtgatacttacagcaactcgctcgggcgaagccaggggaatgcgctgggctgaaattgattttcataagcgggtatggactatacctgcagaaagaatgaaagccaggatacagcatcgtgttcctttatcccggcaggctatttacattctggaaaatatacgtggcctgcatgatgaactggtgttcccttcacccagaaagcagcagatcctttccgatatggtgttgacaagttttctgcgtaaaaagaaagccggcagtgacattccggggcgagttgccacggcacatggttttcgctcaacattcagggactggtgtagcgaacaggggtattcgcgggatctggcggaaagggcgctcgctcatacgctgaaaaataaggttgaggcggcatatcatcgtactgatctactggagcagcgtgtaccgatgatgcaggcatgggcggattatgtgatgtctcaaattgtgaataaataatagtgaaaatgtatattgtacgatcatgatttgatatgtgatcgtagcagtagtaattaagaaaccgcttttatgtcaaatgtattgagctgataattatcagatcgtcaggaaagcgtattttgattaacaggggattacttaacaatcccctttttataaaaaataatttgcctgtttaactcttcactcctgctgagactgaattattcctagtgcgtcataaatcagtcttctgcgtagtttattgtttttatctgcaccatataacataaatatattttcaactttttcttcaggtgttctgagataatggataagaaaggttatcattccaacacaatggaataaagtgaatccatcaaacaggcttatcaggtttccttttttttcccgtgttgtaagtattttttcgcgggtaagaatatttgccagttcatggggggctgatatgtttctgctgtctataatgtcatttattttaccaagggctatatcaacttcctgtaataggttatttatcatagctgagtgaatgttattggtttcatgttcctgacagtttatgaacttataaatcattgagttatacagaaatattactcttcctaataaatatgtgtttgtgtcattttgaagacaggactctgggtattcgtgatccagtgaaataaggttaatggactcgccctgataagtcataaaataattgatgtcatttaataatgctcggatatttacatgatttttactgaattttattttaaatgctatctttagtatagcaaacgcggcaatgataaatccaaaaggtaatttctcatagttcagtttattgatggtgcgatgaacactttcagtctttcctgaagtaagttgtctcaaacagttaacaaattctgtatagccatttaagacataatggcatgaagaatcttttaaagagttttctatgttttgtaatgtgacgccgttgttcaatgtataaatgtaaccgccaaagacaatgttttcaatctcaacgacacaatttattgttttttgttcaggataaagataaatatcagaaatactatagtctcgtattgcgtcaatggcatcccacgataatgcactgtcaattttcagtgtataaaatggtgagttctcattaggaaagtaatatatgtatttgttcagtatattcattacatctattgggttggttaaatataataactggcattcatattctgaaacttctctttcgcttatcagcattttatataaagttgccaggatgcttgttaatgaagttcgtctttcgaaagccagtaatatagtgagataataacatgcacctgaactttatctaagtcagaaattattttttccttgtcttcattacttaaataaagcagatgtttacaggtttctttgcatgtgttgatagttgcgataagttttgtttttcctggtgtactgtttttgcgaatattacgaatgaattcatatacgccatcaaagatatctttgaaatgcgcattcgctggcgtgtatccggataaacataacttaacgtaatttcgcagatatgtccttgcagcatgatatatatcatcctcattatccggtatctgagtgagaaaagaatgaatatgatagtaaaatgccatctcattatccgggcgatatgtgttcctgatgtcgagtgcgagaatcattggtacaatgtcattaaaatatttttgttttattatttgatgtgttttgtctgtaaaaacagaatagtgcattagcttaacatagagatcttcatatctcctaaatataacttttcgttgttctttactcaatacttgttctttatcaataatgtttattaattcatcaaacatgtcgcccagtgaatgttgatgtgaggaaaaatttttaatatttcggatgtcacggctattctggtttttagccagaacaccaaaacatgaaaagacatcatacattatagtgataaaattatacataacattctccttttattgcactatataaaattttaacattatatcattttgcttttctgttaactggttttcatttttgaatcaatattttctgaacagggtaatagtacacgtattaacagattatgtcagaaggccccggtgatgccttctgacgatagattaatgttgtattctattggtatctggagaccatatggcaacagttacagtatattctccccgctgtaattcctataaagtgtaccgttatgatcacagcacctcagatcatgagcgtttccagtgctaatcctgcaaacgtgtatttcaactgaattacatctacgaaacccgaaaaccaggcattaaagagcaaattgttgaaatggttcataacggagccggggttcgcgatagctccagaacgctgaaggtggatatcaacaccgtcattctcactttaaaaaacgctcaccacgtaaagtaaccatatctccagccgccagtgtcgatgtggcacttatctgtgaacttgatgaacaatggagttttgtcgaaaacaaagctcgtcagcagtggcactggtacgcgtataagaccaaagctgacggtgtgctggcttacacttttggtcctcgcactgatgaaacatgccgtgagttgccggaattcctgaagccattctccgcaggcatgataaccagagacaaccggagcagttataccagagaaatgccacaggataagcatcttgtcggcaagatatttacccggcgcattgagcgcaacaatctgacacttcgtactcacatcaaacgacctgcccggaaaacgatttgctttttacgctccctggaaattcacgaaaagccattggttcatttatcgaaaacacatgtactactgacaggagtcattaccagggcctcttttgctgtttttttgccatgaatgataatgagaatcgacagcgataagggaaaagtaaaataacactaatgctgtcgttttctatcatattgatttttaattatttattgtcttttttctcaacccatttttttacgcagacaaatttacccggggaatacaaactgtaacgacagttcaccacactatgggggataaaatgccagatcaatccggacactgcaggactccttcacgcatcttacggatgcctgaactgagccaattgttaggtatatctcgttcgacaatttacgaaaaaatgaatccgttatcgaaatactacgatgcaaccttccccaggccggtacgtcttggtagtggttctgtgggctggcgttcatcagctattgacgaatggcttactttacatactgtacctgccagatcagcagtcaaaggtgttaatgacgaagtgagacatacgctttcttcagatatgaccatgagcagataagtttttgtcatcacgtgatcacctcaggaggaaaaagaagcataagaacaatttagccagaagtttaattgataaacagaatttccagcattcattgttgaaagagcagctattgtcgctattgtagcggtaattgctgctataaccgaaacgtattacgaaaaaggaagcatttatgccttacatcaaaccggatatgtcgtattcagtatatgcatgaccatcaatgatagggaaggcaataattaaagctcaatacaataaacaagtacctctgactctggttgcaatgtcagtattaacagcgatgtcaattgcctgtcagaatcaggttgacgtatgcagtcccggaaatttacgtggggccgttaatatttacactatggttctggagaaagggaaaagaccgggggaaaggtattagtgaaataatttccggaggtattaagaatgagaaatatgaatgatatttcgtggtgaataatacagtcttcactgaattaaccttatcggtttattaaacatcagatctacaaatgctctgtatttctcagagcatcaggtctgaatagcagctattttcgctattgtagcgggatttgctgctattttactaacccattaatgaaaagagaggcttttatgtgcttacttgcaccagaaaatccttatccgatatatgcactaccaccgctggtgagaaatgcaataattgaaactcaaaaaaatacacaggcacctttggctatggtggcaacatccgcattaacagcgatctcaattgcctgtcagaatcagattgacgtgtgcagacctggaaatttacatgggcctgttaatctttactctctgattctggctgattccggtgaaaggaaaacgaccgtggataaagtgtttatgaaagcattttatctcagggatgaagccctggcggatgaatacgcgaaactggttgagaattacagtacagaaaaggaaatatgggagcaaaaacaaaaagcgctggaatcaaaatttcataaagagattcgtgccggtaaagattacaaggcaacagaatcagagcttgaaacgcatctgaataaacctcctgttccgccgcagatacgtcgaacaatttttaatgagacaacgatagagggaatgttaaaatattactccgatagcaatcgctcttttgctcttgtatccagtgaagggggggtaatttttgacagccgggccatgagtaaactgggaattattaacactttgtgggatggaggttctcttttcatcgacaggaaatcatctcccggaattaatttgaaggagccaagactgacgatatcggtgatgattcagcctgatgtttaccacaaaggtttttgtacgcgaaaaaaagaaattgtgaaaacgtcaggacatcatgcaaggtttttgatgtgtcaaccaacatcaacgcagggacaaggataataaccggagataattattcatcacagtatcaggatttgtttgaagagaggatcaatgagcttattgatgaaagtctggcgatgagtggtgaacgacgttgccttcacttttctcctcaggctgccagaatctggacggattattacaatgatgtggaatcgaagctggggggattggggcctttaagacattgccgggaatatgctgctaaaaatgcagagtatatggcaagactggcaggacttatttaccattcgagcggtgaagagggggagatttccccttacactgcagaaatggcgagagaattagcaatatggtacggtaatgagtatgtgcggttgtctaatccgttaacttttgacaactctgccctgaccgtacctgtgcgactcattccagaggagcttgaacttttcaactggataaaaagctattgtattgagaaggggatcctctgtatgaaaaaaaatgacatttttcagcgtggtccgaaccgtttccggaaaaaggataaaatcaactggttactggatttactgtatgaacaaaacagagttgtaccggttattgagggaaaaacgttgtgtgtcgcacctaactttgacctctgaacgacttaatcgttgagtacatatagtctcctctgctacttgcggaggagactaatgtctttaccatgtcagcgttgtattagaaaactctggtacaggtcagtcagtaaatataactggtgtaaccactatttactattggatagagtgttactcaggatattgtcggctttagtctgaggtgaggtggggccttcattgttttcgtgttcaataaataatttaggttaattagtattattagtggaagttatgtgatctgttatgttgtcttgtacgcacttaacactggttacgtaccggaacactattagagtatgttatggctctgttacagtttataggtatgaaaaaatataatcttccctgtatgaaataatattcttatggtgtgtggggtatggtctgtataccatcatttttatggtgaagttaaatatctgtagaggcctcaagctgggtcgctgtttttacttaatggtacagaagtattaatagcggtgttgcctgtggctacccgatactggcttttgtgaatgtcagattacttcctgtaagtgattgaatggtacttccttaaactcaattctatgaggtgtgtttttaccattgtaattcgtactggtcctcagtttaagtgagtcttactgtactctgaaatattacctctttggagtaatgaggtaatacgaaacagttttatcaggttgtctgtgctgctggttacctcgtttattaatgccgcggtacggcgtttctgtactctcagtatttatgtaattccaccttcctgtaacttttataaagtaaggactataaaatgtataatgctaatcccaattacgaaatggacttcatgattctgaaagatgtgaatgaacacatggaaggtctgtttcaacgtttttctaaactgttacctttcagaattgattttgcctacaggaaagacacgcccagttttggtcattcctgtaggcacagtatgtgtattgaaatgcaccgcttacttagtgaaacccaaacgatgctggcgggatattactgggtaatggaatatacgtcaaacaagggacttcatattcattttatcggctacctggatgggcaacgtcacaacaaatcttatcggatatccaggcaactgggagatatctggaggcggatcacggaaggggagggttattttcacctgtgcagggctaaagacaaatacccggtgcgtatcgatcacgtaattcactatagtgataaatctgcggtagacgacttacgttacgcccttagctatctggccaaacaggatcagaaagaacacggtattattctgaggcgtagcaggcttcccgaaaaaagtaaccggggccgaccacgacataactgaattacagctgtattaggtattagaattaagtttctgtaagttgttgggaggtgcttgagttaataggcagaagagggcggggcgctttgtcatcagtgtaggggacccgaatttctgccgtggtgcctcagtggatcggatacaggtaacgaatatggttcataaatctgacagtgatgaattagctgcattgagggcagaaaatgcccgtctggtctcattacttgaagctcatgggattgaatggcgacgtaaaccgcagactcctgtgcagcgcgtttctgtattatccaccgacgagaaggttgcattatttcgtcggttgtttcgtgggcgtgatgatgtatgggcacttagatgggaaagtaaaaccagcggcaaatcagggtactctcctgcctgcgctaacgaatggcaggcgagaatatgcggtaaaccccggataaaatgtggggactgcgctcaccgtcagttgattcctgtatccgatctcgtcatctaccaccatctggccggtacccatactgtcgggatgtatccgttgctggaagatgattcctgttattttctggcagttgattttgatgaagctgaatggcagaaggatgcatccgcattcatgcgatcctgtgatgagctgggtgtacctgctgcgctggaaatatcccgttcacgtcagggggcgcatgtctggatattttttgcctcacgagtttcggcccgcgaagctcgccgtctggggactgctattattagctatacgtgtagtcggacccgacagctgcgattggggtcttatgaccgattatttcctaatcaggatactatgccaaaagggggatttggtaatctcatagcgttacctctgcaaaaaagaccgcgtgaattggggggaagcgtttttgttgatatgaatctccagccttatcctgatcagtgggcttttcttgtatcggtgaccccgatgaatgtgcaggatattgaaccgacgatattacgggctacagggagtatccatcctctggatgtgaattttatcaacgaagaagacctgggtacgccgtgggaagagaaaaaatcatcaggaaacagactgaatatttctattgcagaaccgctgaaaatcacgctggcaaaccagatctatttcgaaaaagcgcaattacctcaggtgctgattaaccgacttattcggctggcagcatttccgaaccctgagttttataaggctcaggcaatgcgtatgtcagtctggaataagccccgtgttataggttgtgcggagaattacccgcaacacattgcgttgccccggggatgtctggacagcgtattatctttccttagggacaacaatattgctgcagaattaatcgataaacgatttgccgggacggaatgtaatgccgtttttatgggaaacctcagagcggagcaggaagaggccgtttcggcattactccgttatgacactggtgtgctttgtgcgccaacggcttttggtaagacagttaccgcagcggcagtgattgccaagcggaaagtgaatacactgatactggtacaccggactgaattgctgaagcagtggcaggagcgtctcgcggtgtttctgcaggccggtgacagtattggtattatcgggggaggtaaacataaaccctgtggcaatattgatattgcggtggtgcagtccatatccagacaaggagaagttgaacctctggtcaggaattatgggcaaatcattgtggatgagtgccatcatattggcgcggtttcattttctgcgattctgaaggaaacgaatgccagatatctgcttggcctgacggcaacaccaatccgacgggatggtctgcatcccattatttttatgtactgtggtgccattcgccatacagcggtccgcccgaaggaaagcccacataatctggaggtactgatccgttcccgttttacatctggtcatttaccatcggatgcgagaatccaggatattttcagagaaattgctctggatcatgacagaacggtggcgatagctgaagaagccatgaaagctttcgggcaggggcgaaaagttctggtactgactgaacgtacagatcatctggatgagatagcatcagtgatgaattcactgaaattgtctccctttattctccatggtcgactatcgaaaaaaaagcgtgcgatgctgatatccgggctgaatgctcttcctcctgattctcctcgaattttgttgtcaacaggcagacttattggtgagggatttgaccaccctccgctggatacgctgattcttgccatgcctgtgtcatggaaagggacattacagcagtatgcagggcgtcttcacagagagcataccggtaaaagcgatgtcaggatcattgattttgtggataccgcgtatcctgtgctgctcagaatgtgggataaacgtcagcggggttataaagcgatggggtacaggattatagctgacggcgatgaatcagtgatttaattttaaggagtactttaccctttttaaataatttgagctccccgggttgttcgggcaacaaagagtcccagtatacaggcttcaggaatatgttgtagtatcaggcttttcatcgctttaaaatgactaccggcagtgagaacgtcatcaaaaataacaatctagggcctgcacccttccagtaattgttcatccagttggtagtttgccataatcgcttctggtaagggccggtttgttgcggtatgagaggctattgttgatacgttttgcacaaccagttcccagaaatccagccatggttcgtaggtttgcgcaattcgcagaatttctgtcatacggtcatcgtaagcggcatctgtacggcatttggatggtggtacgggaacaaatgtgtattcctcaagattaccgatatttgatatgagcatctgagcaacatactcaatagcagcctttttatagtggtaatcaggctacgaaagtacagcgttttataaattgtctcaggtgatattcgcagcgttttttgacgtggttttgttcgccttaaccatcctgatatttgctctggagaccatttcatctccagcttttccagaacaagctttcgcaatggtaaattttgatccagtaagcacggttttggccttttcgccattctgttggctcggttattagcatcaacagctttgtaatagcgtctgccccgattacgcgtaagcgtacagcgagggccgtattgacggggatgtgttattcagctggcagtgctatgcgccacggaagcagttcgctgacccggttgaccggccagtctgctatgacgccaagcacatggcgaaggtagctttctggatccacgtcattcagtttgcacgtcccgatcaggctgtacagtagcgctccccgctcaccaccatgatcagagccgaagaacaggaagtttttacgacccagactgaccgcccgcagggcattttcagcgatgttgttgtcgatttccacccagccatcgttcgcatagtacgtcagtgccggccactggttaagtgcgtacgcgaacgccttcgccaactctgagtgtcgcgacagggtcttcatcttttcacgcaaccagctttccagggatttcaacaacggtttcgtttttcgctgacgttcagcaagccgctgctctgccggcattccccttatatccgcctctatggcgtacaactgaccgatctgctccagggcttcttccgtcagtgctgacgggatgcggacgtgcacatcgtggatctttcggcgggcatgagcccagcaggcagcttccgttatcccaccattgcgatacagctcgttgaacccggcgtacgcatccgcttgcagcacaccgctgaagcaggcaagatgagtctgcggatggatgccttttctgtccgggctgtaagcgaaccacactgcaggtgccaacgctgaccctgcattgcggtcatcacgaacatacgcccacaaccgcccggtcttcttattacccggcagcagtacctggaccggggtatcatcggcatggagtttgccgtcagtcatgacatagccatgaagcgcctcttccagcggagacagcagccggcagcatgcatccacccagcccgacagcagtgaacgcctcagctccacaccttgccggccgtatatttctgactggcgatacagcggggtgtgctctgcatacttcgaggtcagcacgcgggccagcagccccggtccggcgataccccgctcgatgggccgcgaaggtgcaggtgcctgcacgatggcatcgcactgagtacaggcatgtttttcccgtaccgtccggataacccggaaggcgctacgcatcaactccagctgttcggcggtatcctcgcccagatagctcagtgaaccgccgcagttcgggcagcacggcgccgctggcaacagtcgcttttcgtcacggggtagtgattcagggaacggcttacgggggcgggtctgacgcaacggacgctgtactgccgggtcatacaccctaccagtcagcgtatcgctctctttctgaagccggttcagatcggcttccatttgtgcgatacggcgggagactttttcggaacgactgccgaagttcatccggcggagtttatccagctgcgcctgcagatggtctatttcgcgctcccggttgctcagcttttcctgcagggcgtggatcagcgcttcctgttcggccaggcgctgtttcagcaggaagatgtcgtcagaagagatgtcgttcataagcccgtattttaccgggcttattctgtgacaaccaggataaagagatttacagcatggtcagggaggtcagcagccgcttaggctgtcgccagtcgataccttccagcagcatcgccagctgcgcctgcgtaaggaacactttgccatcacgggctgacggccaggcgaagcgcccacgctccagccgtttggtcaggaggcacagtccgtcaccggtggaccacagcagtttaacctgactgccgctgcggccccggaaaatgaaaacatggccggacatgggatcgtctttcagcgccgtttgtactttcgcagccaggccgttgaagccatttctcatatcggtgataccggcaaccagccaaattttggtcccggaaggtaacgggatcatcgcttcagttcctgtatcagcagagtcaggagcttttcgctgacattgccattgaagcggagcgtcccgtgccggaacgttacctcacagctgatactgagggtttccgggtcctctgcgagcgattctggctgttcggcagctgcatcgagagtcacaggaagtagctgggggctctctgaagaaggtaatagcagctttccctcgcgccattgttgtcgccatttgaacaacagattggcgttaatgccattttcaagagcaagttttgagatggatatcccgggttcacaggaggcagcaacgagctgctgtttaaattcgggaggataattagggcagccttttcgcctgccgggagtcacatttttctgcatatctgatactttggttcccactacttatttgttggacaccactttgtctaattcgtcagattctgaccagacggttcaggctgtacgcttacgattacgctgaacttcacgtgagatcgtcgaaggactgcgattcagcgcagtagctatcgcacgaatgctcattttggctgacaaaccagctcgtatctcctcgcgctcagacagtgtcaggtgagctacagcccgcttacgctcatggggttttatgccgccagtatcccttaacatagtgaagatcgttccgggttttgaacccaggatattcgctatttcactgaagcctgttccgttcttccatagttcaaaaacagaggctttttcctctgctgtaaatgttcgtctcattcaaaaaacctccgcaaccccatgttttcacataactgttgcgttgaccaattgaatctacaacagcgtattttgcacaggagtcgctgaaaaatacgcgttaatcgaacaatggcgacaacaatttcccattgaagcgatgtgtcaggtatttggtgtatccaggagcggttattacaactgggtacagcatgaaccctcagacagaaaacaaagtgatgagcggctaaaactggagattaaggtggcacatatccgcactcgcgaaacatatggaacccggcggctccagacggagctggcagagaatggcatcatcgttggtcgtgaccgactggcacgtcttcgtaaggagctaaggctacgctgtaagcagaaacgcaagttcagggcgactacgaactcgaaccacaatctgccagttgcgccaaatctgctgaaccagacgttcgctcctacagcaccaaatcaggtctgggtggcggacctgacgtatgttgccacacaggagggatggttgtacctcgctggcatcaaagatgtttatacgtgcgaaattgtcggctacgccatgggagagcgcatgacaaaagagctgacaggtaaagccctgtttatggcgctcaggagccagcgcccacctgccgggctaatccaccactctgatcgaggttcacagtactgcgcatacggttaccgggtcatacaggagcagtttggtctgaaaacatcaatgtcgcgtaaaggtaactgttacgacaacgctccgatggaaagcttctggggaacgctgaaaaatgagagcctgagccactatcgttttaagagccgggatgaggccatctcagtaatacgggaatacattgagattttctacaatcgtcagcgtcgtcactctcgtctggggaatatatccccggcagccttcagggaaaaatatcatcagatggctgcttaaaaaaagaacaaatggtagtgtccgctattgtcagtacacctcaaccatctggcttgaacctgcgagcgaacgcaccgttttcctgcagatcaaaaacacgtcggataaagacatgagtggactacagggaaaaattgccgatgcagtcaaagccagaggttatcagatcatgacttccccggataaagcttactactggatccaggctaacgttctcaaagcagacaaaatggatctgcgtgaatctcagggatggctgagtcgcggttatgaaggtgcagcagtcggagctgctcttggaggtggaatcacagcgtacaataccgggtcggcaggtaccactctcggtgttggactggctaccggtctgattggcatggccgcggatgcaatggtggaagatataaattacacaatgattacagatgttcagattgccgagcgaaccagaaccagcgtcagaacggataatgttgcagctttgcgtcagggaacatcaggctccaaaattcagacaagcacagaaaccggcaaccagcataaataccagacccgggttgtatccagtgccaaccaggttaatctgaagtttgaagaagctaaacctcatctggaagaccagctggcaaaatcaatcgccaatatactctgatataaatatcccggtggccattcacctggcctccggccctcttagtctcaacgttcagacaattcagatattattttccctgtcacaccatatacccatgccggaacagaatctaatgacggtaccagtaaattcttcagcgttcggtttgcctgacgcccgtagctgtatttgtgtctgtttcttcttatacaagagcagtagtacaatttctcttccagagtcagttcaactttaggacgtaaccaataaagatctcttccactataaaatggtgaatcctgtacaaacgattccataacagaacctcctgctgctacagttaacacagctgctggcatggactaataccatcttttaatttaaccctggcggagacgccattatttttggacgttcttgaaacaaaattaattcctgaagaatctttctccagtttattcagctcaagattcagtccataattaacgtcaaataactctgataaaggtatcagtttatgttcaggataatgattatcccgacgacaacaaatattaaaatcctgcatattacccgacatcaggagttcaaaaccgtccccggcatcattcatactggcagataaattcattacccagtttagtgctaatcaacaggtacggcttaacttacaggaattccccgggaggggcggactcatcctcagttagcggcaaaatcgcatcacagccaatcgcctgtctcgattccccatcggcgaacaatgtatgtggccacaaaatcctggctggctcagaacgaagagcatctgagcaaagaggtcatcaatctggtatgaatatctggcagaaaatatcccctgaatccacaactgctgtgcatatctgctcaaatcagcatcaatcataaaccagtaatcacagtgcctgtgattgggttacaggaataagtcccccttcataaggcatatcatcaataccggtgaaggaaaagaaagcatcagatggcctgatagtctgcgtcagtcaatgacatcagtgctttatccggaacaatgtatccatgttggcgacagagaaagccattgccatgaacagttttgtttatccccggaaagtcatttctgttacaaatttatattgacaaacttgctttcgatgagaaacatactatttcaatgaaatgcagaatgaggcaaaatttcgttatgttttttaattcccgaaagaataaatgtggcttattacaaaatcctgttaatgttaactgatattttataatgcatattcagacatataattaaataagaggtatttatggctaatacgaccactggtgttaccagaattattaaagcagcgggttattcatggaaaggcttatgtgcggcatggcgctatgaagcagcctttcgtcaggagtgcattctggttctgtcagcactgataatatccttttggctggatgttgactctgttactcgagtattactcattggttcggcaatgatggtaattattgttgaaataattaacagtgcaattgaagcagttgttgacagaattggttcagaacatcacgaattatcaggcagagcaaaagatatgggttcagccgcagtgttgattacgattttagttgctatcattatatggggagttttattactttcataacgcccaacatctaaattattcacagttacctggttaatatttacttaaggataagaggtattcacctcttatcctcagaaaaatgtcagtatctatctgcaggaggatataatatcatcttctttattataaactgaagtatttacattccataaccccagtaacgatgaaaatatattatcatgacttactgttctgtttagagcatgttctgacaaacaattcaaatcaatttttttagaggaaacgaaccccggagacatccaggtaataagaggcacatgcgtttgctcagctggagcaacattatatggtgttccatgtaagtataatccattttctcccagagattctccatggtcagagacatataataaaacagtatcatactcatctttatattcgataagcttgtcaattaattttgatattatataatcagtatagcgaattgtattatcataggtattaatcaattgctcatgcgtacaattttcgatatcactacgatcacatgttggtttaaaatatttatgtgactcaggataacggagatagtaggtaggaccatgactacccatcaaatgaaatacgataagtttatcctctgagttattatttatatactcatcaatattttttagcataacctcatcataacatgagtttttcttgcataatgtattatctgaatttgatggctcaatattaattgtagggattcgcttacatacacctttacatcccccgtcattttcaatccagagtaaatttacccccgttctgtacagaatatccagtacattttccgaatttaccgctttgcgggaattgaactcttttcgcttcatatctgaaaacatgcatggaacagatatggctgtggatgtgccacacgactgcacattatgaaaggatataagttcattatatttctttgtaaaatcattggtaccacgagaatatccattcagagcatagttttgacttcttgctgtctccccgacaactaaaaacataattaccggcttttgtttttcatttattgtgcgggatgcatccgttccagtctgacgaaactcgccaggagaaacaaaaaaatcccttacatatttaaacccactgtagatataattagtaggtattatttctttatttaatgaagagttgtttctgccaactgatgcataatccttataaaagaaaaacgcaatcgcaaatataatcaagagagatgcaaacattgatattaaacgatatataataccctttatccatgtctcaggataacggatatttactaacaacaatagtccacatggaagtatacccgtaaataaaaaccacagtacaacagacatattgaaatatgatgtcatttcacctgcatttgtttcaaaaatattctgcatcattgttttatcaaactgcacaccatatttcatggtggcatatgtaacaatggaactacagataaacagaatacaaaaaaaaggtttaaatatatacctgaatgagaacggtgtaaaaacaaaatttaatgcagatatcagaaagactggaagagatataataaatccaagtttcacaccatcaaggttattaataatattaaacagatgcatccagacagggatattgaacaatgtggcaaaaacaacatctatcattaacatcaagaaaagaaaattaatactgatttttttaatcatcttacccccattaattagagtctataattgtccgtatctaaaagtgatatatttttataaaacctggtaaagtgaatactgatttataccaggtcaaacttcaacttcatcatcaaaactttatgtcaataaaggcgtttatagttactgattcttttattttacaacaccactaacatctttttaataaaaaatatgttcacaatagcatacacagaaattctctaaggtattatatcatcaggaaatattattattccattcatctctggaggccccccctcgatatgaaaaacgatatcacacagaagccctgccgtgtacagataaactgtttgcagaccagtcagtgactcaggagcgacgtccgcaacaaatgtatggactgtatcacagatgctctccccgtatgactgaagacaggcatgcatgaaaatactgtcgcttccccaagaaaaggggaaattatcatctgcatgacccgaccagtgctcagtcatgaacactctgtttcagtgagcagtttccgcattaatgaatctgtcatactgctattgtatcagcaagttatccccataacaccttgatatcattctgagccagatggcataatcacagcccattgtcggatctttctgcctgattctctggataatcccgacaatatgcattgcttttctggcgatgtatagccccgggagccggaacgcttcatgacgaaaacaaacattcgtattattcagacgaaaactcactggaaaggcatcatcttttatataacaaggaaatccggctctttactgtcgttttatctttatttatcaggggcgtaagattgctcagtaccgcgttaccacaaaataaaaaaggctggcaggccatgctggatctccgttttcagcgtctgcacgggaaaaccacgctcaccacccgtcatcatgtcggtccgctcactgttcagcgtcctttttatcccgaagaagaaacctgccacctctgtctgcttcatccacccggtggtatcgtcggcggtgacgaactcatcatcaacgcaataattgactctgattgccatacgctgatcaccatgcctggtgccagtaaattttaccgcagcagcggcgcgcaggcgcaccttcagcaaaacctgacgctgtgcaataacgcaacgctggagtggttgccacaggattcgattttttttcccggcgctcacgccacgttgcataccgtgtttcatctgtcgtcctccagtacactgctggcctgggatcttctgtgccttggacgtccggtcatcggagaaaccttcagccacggaacactcgctaaccgtctggagatatgggtcgacggttctccgctgttgattgagcgtctgcacgtggccaatggagaacttacctgcgttgcccggaaaccatgggtgggaacgatgctgttctacctggggaatgaaacgcaactggaagacatacgcgaaaaactcacaccactggaaaactacgccggagccacgctcaccgatggtctactgacagttcgctttttaagtgatgataatctgcgttgccagcaggtaatgcgtgatatctggcaatttatgcggccgcaactgactgacaaatcaccggtacttccccggatctggctgacttaagagaacgctatggaactgactccaagagaaaaagacaaactattactgtttaccgctgcactgctggcagagcgtcgtctggcccgcggcctgaaacttaactatcccgaatccgtggccctgattagcgcttttataatggagggcgctcgcgacggcaaaagcgtcgctgcgctgatggaagaaggacggcatgtcctgagtcgcgagcaggtcatggaaggcataccagaaatgatccccgatatccaggtcgaagccacctttccggacggctccaagctggttaccgtccataatccgataatctgaggtaacagatgatccctggagaatataaggttaaacctggctatatagagcttaacatcggccgggctacctgcagtattatcgttgaaaatcacggagaccgaccaattcaggtcggttcccattatcacttcgcggaggttaacccggcactgaagttcgatcgccagaaggcaagaggctatcgtctcaatatcgccgccggaactgcagtgcgcttcgaaccaggccaaaagcgtgaggttgaactggtggcgctgagcggtgcccgtatcgtgcacggtttccgcggagatataatgggtgagctggaggcaaatgatgagtaatatttcacgccaggcctatgctgacatgttcggccctaccaccggtgataaaattcgtctggcagacactgagctgtggatcgaggtcgaagatgatttaactacctacggcgaagaggtcaaattcggcggcggtaaagtaatccgcgacggtatgggacaggggcaaatgctctccgccggctgcgctgatctggtgctgaccaatgccctgatcatcgattactgggggatcgttaaagccgatatcggcgtcaaagatggaaggatatttgctatcggcaaagccggtaatcctgatatacaacccaacgtcactatcccaatcggcgtatccacggaaattattgccgcagaaggcaggatcgttaccgcaggtggcgtcgatacgcatattcactggatctgcccacagcaggctgaagaagcgctgacatccggcattaccaccatgatcggtggcggtactggcccgacagcgggttctaacgccacaacctgtaccccaggaccatggtacatttatcaaatgctgcaggctgcagacagcctgccggtcaatatcgggttgctgggtaaaggcaattgctccaatccggatgcgcttcgtgagcaggtcgcggccggggttatcggcctcaaaattcacgaagactggggagctacacctgcggtaatcaactgcgcactgactgtagccgacgaaatggacgttcaggttgcgctacacagtgatacgcttaacgaatcaggattcgttgaggatactctgactgccatcggcgggcgcactatccataccttccatacagaaggtgcaggtggtggtcatgctccggatattatcaccgcctgcgcgcaccccaatattctgccttcctcaaccaatccgacgctaccctataccgtcaacactattgatgagcatctggacatgctgatggtttgccatcatcttgacccggatatcgccgaggacgtagcctttgccgaatcgcgcattcgccaggaaaccattgccgcggaagacgtcctgcacgaccttggcgcgttctccctcacctcgtccgattcgcaggccatgggacgcgtcggagaagtagtgttacgaacctggcaggtggcacaccggatgaaagttcagcgcggcccgttaccggaagaaagtggtgataacgacaacgtccgcgtgaagcgctatatcgctaaatacaccattaatccggcattaacccacggtattgctcatgaagtcggctcgattgaagtgggaaaactggcggatctggtgctctggtccccggcgttctttggcgtaaaaccggcgactatcgtcaaaggcggaatgatagccatggcgccgatgggtgatatcaacggctctatccccacaccgcagccggtgcactatcgcccaatgttcgctgcattgggcagtgcccgtcaccgctgtcgtgtgactttcctgtcgcaggcagcagcagcaaatggcgtcgctgaacagcttaacctgcacagcacaactgctgtggtaaaaggctgccgcacagtacaaaaagccgatatgcgccacaacagcctgttgcctgatataaccgtggattcacaaacctacgaagtgcgtatcaacggcgaactgataaccagtgaaccggcggacattctgccaatggcgcaacgttatttcctgttttaaggagcacaaatgctttatttgacccggcgggtggagaccccggctcagacaactgccagcgttaccctccctgttgacatgcgggtaaaaagccgtattaaagtcacccttaacgatggacgtcaggctggactgttgctgccacgcggtctgctgctgcgcgatggtgatattctcagtaacgaaaacggtgatgaattcattaaggtgatcgccgctgatgaagccgtttctgtagtgcgctgcgcagatccttttatgctcgcgaaagcctgctggcatctcggcaatcgccacgttccgctgcaaataatgcccggagagctgcgctaccatcacgatcacgtcctcgatgatatgctgcgccagtttgggctggatgttgattttgcacatcttccgtttgagccggaagccggcgcttacgccagcaagtcgcacgcccataatcacgatcaggagcacagccactgaatgccgactccggaaaaacgtctgcggctgatgcagcttgccagtaacagcctccctgttggaggctacagctggtcccagggactggagtgggcagtggaagcaggctgggtagaagatagcgccgcctttgaacactggcagcagttgcagatggaacagagtttttttgccgtcgacctgccactgcttgcccggctataccgggcctgtgaagcgggcgatcctgacagtgccgggcgctggaccgcttatctgctggcctgcagggaaacccgtgagctacgcgatgaagaacgtaaccgcggtgcagccttcaccagacttctggtcgactggcagcccgactgcccggccgaatggcgcaaactatgccagcaaagccagttaaccggtatggcatggctcggcgtacgctggcaaatatccgtttcagacctggccctgagccttggctacagctggattgaaagcgcagtgatggcgggcgtcaggctggtaccctacggccagctggctgcccagcagttaattatgcgcctgtgtgcccgctatgcggcgaacatggacagtgcccttgcaaccccggatcacgcaattggttcagcaacgccacttgcatctatcgcttccgcgcgacatgaaacccagtattcccgattattccgttcttaggagaaaataaaatgaacataatcaagcaaccgctgcgtgtcggcgtcggcggtccggtcggctcaggtaaaaccgcgcttctggaagccctctgcaaatccatgcgtgacacctggcaattagccgtagtcaccaacgacatctacaccagagaagatcaacgcattctcactgaggccggagcactggaagcggaacgcattgtcggtgtcgaaacggggggctgccctcatacagccattcgtgaagacgcatcaatgaatctggcagccgtggaagcactgagtgagaaatttggtaatctcgatctgatctttgtggaaagcggcggcgacaacctgagtgcgaccttcagccccgaactggcggaccttaccatatatgtcatagatgtggcagaaggagaaaagatcccgcgtaaaggcggtccggggatcaccaaatccgacttcctcgtgatcaataaaactgaccttgcaccatacgtgggcgcctccctcgaggtaatggagcgtgatactttacgtatgcgcggagaacgcccatgggggttcactaacctgaaaagtggtgaaggtctgcaaaacatcatcgcctttatcgaagagcagggcatgctgggtaagtaatcacaacatcctctgtatcagggccggcaggcggccccttgtttttatcagaaggaataacggaagttggcgttcaccgcgttatccacgttgtacttaccagatgccgatttttcaaactccagaccgaagcggatgttgtcgcgaatttccgcattcaggccaacattcatgagcatacgaccgtctttttcacccttgatgcgtttttcgccggatgcatcacgcagtacggtttcaccgttagccagcaggtcaaactgataaccgataccgtcgcgggcagtgaaagagataattgaaaggggtgttgcattgacagattgaatctacagctgcttttttaatatatctcgctcaaggcgagcttcatttaacgccttacgcagttgcagaatttcagattccagttcagccaccgtgcgggaaccaggagtaccgagcccttttctggcggcggtaacccattgtcctaaagtgccttcaggaagagataatcgggaagcgccttcactgatcgaaagttgattttcaagaaccgttctgacagcttcggctttgaactctttagagtaacgttgggtttttctgctcattattagctccttctgatgccattctatttcaggaaggagtgtccgttaaactcaggctacctcaggtttcactcatctgggtttttacttccagatttcgttttttgatcgctgtgcccatggctccacatcctgaaagagccagcgcagagctgaccagtgcaatcatcataacttttttggttttcatttaatgcccttcttatccgacaggtttatggaagacagagaaccgcctttacggtatattttttcagcgggcttctcaagtatgttaaaggatacaggtaaaaacagcgggatcagatacgtcgggtaaacgtttatttcataagaagtttttaggtcagaataaaataatgggtgttgttatattatcagatgatgatttatgtgagcgcgttacggatattgcacatgaggttaaaggagagagcaagcctccgcaacggctcgcttcttatttaatggattttttcgggaagtccagtttataattatataacatattgtaatactgaaagagagtgaggttataagaacagacagttgaatctgaccgtctgaatatgtacctttatgcggaattttcacttaaagggggaaaactgttgtgaaaccgaatatccatccggaataccgtacagtagtatttcacgataccagtattgatgagtacttcaggatcggttcgacgatcaaaactgatcgggtaattgaactggatggtgtaacttacccatatgttacaattgacgtttcttctaagtcgcatccgttttatacaggtaaactgagaactgtcgcttcagaaggtaatgttgcacgctttacccagcgttttgggcgttttgttgatgcgaaaaaaggtggctgattttgccgccagggtgcgtttgacaatttaaaaacgcaccagacagagagatcctgcacctgaatataccgttagcccgtcccaccggggcgtgtgcagatgatctcgtcaccggaagattgcggacctctctgaaaaccagtacattacgcgcgggtgcctttcggctgacggctggaaggattacctgaaggccggatgtggaaaggccccgagtcaacttaaacgttaacccgaggccctgaccatctaccttcagcaagtggaaggttagcgcctctctgtaaaaggagcaagtgctatgccgcaaaaaacgatcattgtgggcatgttatgcctgaccatgttgctgaccgtctgggtgttacacgcatcaccgtgtgaattcagggtaagcttcatgtggtcggaaattgcggcgttcttgcagtgtaaaccgtaagaaaccgcagcggggacaacagtccccgctatccggttgccaaaggttcggtcgaaagtcgcacccttgcacacaaatcacaaagaaaaaacaaaagtccgcagtgtaaaaactgtgggcttttttattcgcatcccgaaagtgtggtaacagcgtgggggcaccaaaaaaagccccataaaatggggctgaagattctgtaaggaatttcacagcaatgagattcctgctttctccaaggatatacgtgtcttcaggctgaatcaatgggggcgtggctctgaatccacctgcgattaaaacttgcacaatgccgggagttgagttagaaaagtacagggcgcgatatccggcttattttgttgctgtgttttgcctcgtgctggatgtcgcgtccaccgtttttctgatgattcatatgaaatggtactttattgatttactgccattctgatttgcctttttatgttcattattgcggttgtcacttccagtttctggtgatgttttgataaaagtgaaagaataaaacgataattgcagaaggtattgctaaaactatacatgtcattatataaacaagatgaaaatgatatataccataagaccagaaaagaggttttttccagaatgatatggatgtgtattttagtgtgattgtttttgtcaggtatattgaacaaggaagggccaggccactgagtatcagaaataagtcaacttttatcgatgcttctgttggtgtgtcatatatcagatgcaatatggatattataatggggcacattccccacaggatatttttgaaatagaatttccggttcatatgtttatgctcttttgttttatctcgggaattgtctcttttttttattcctgaacattttcgttgtttaataaccatggggtattatgattatcctttatttttgatatgtaattgtcaatagtggatttcgtttcattattgtggttatagtaatcatgaagagtgcaaaacacatcatcttttattgtggcgattaatgggggttgggtgaggttaaaatataaagaacgattgcttagtgtcctgaaatgaattttttcgccaatgaccagatcggtgtttattatattgtagcctatttcaattatattgtttgatggcatgtgtaatacatatatgggatatttgttgtgtttttctattgaataataaataaaatcaggcacagacgtctgttttagttttttttgcatttttcttatatgtcgtgacattaatatcattttcgagagaatgaataagagtctaaaaaagagattaaatactatattcagtactatcagagtaacaaacaggccaactccccatagttctgaaaatatattgtcattgtaaatatactggaatgtatatccggctgataaaaatgccaatatatataacgctatgtctgttttgtttaggttttttattagatcggttattattgattttaagaataagatggtaataagaccagtgataacccagaaaaaaataacggaaaattccataattatacctttatcgtgtttctggggtggtaatctatcattgtgctgatatgtgtgtaaatacatgcattatctgtttcttatattctttttatgaagttactgattaatttatattagaacatcacattcataatgaaatcaacatgttcatatggttgggttgacggcagatttccctttttgttaacctgtatttgcattaactgtcgcttttgcgaccagccaatgttccagcagtctgagagggacgccttcgggtgactgccagccaatgtttcagcaatctgagagaaacgccttcgggtgattgcaatatcctcgtagcctgaaagaggatgcctttatggtggtacatccgtttagcctctgggaacggatatcactacggtgattgaggtacgttgatttttccttcggattaccgtggtgcttccggacaaccggactactgtgtattcccggcagactggcataaaaacgcctttaaaatctgcgtcttaagatattttctgactttccgcatgcgcttcttatgactgtgcgcacggcataagaccatttgaaatttggtcgcttgcgtgtgcatgtggagtttgaagctgtgcgggcgtcactttcgtcagcgttaaagctgacaaagtgacgctcgcacgtctactcaacgaacccgcataaactggctctttacgagatgttttttaacatttgaagaagtgaccagacgtgaacgtttttttcaacctcattctgtatcgtactggcgcttctccggactgacttactgaaagcttcgtaccaacagaatcgcattgttttttaaggagttttatgtagtgagataccgaatcggcgatatgtctgacaggcagatatatcgggggcgacctttaaaggtacagttaattctgcggtcggttagccaaaccgacttgacaccccgctaaacctgaactgattgcgttaccctgacgcacaggtactcactcaccgaaggaacgtaactacaaaccgtgtcgtcagtaatattccggcgaactcatattgacgcgtttttcgggcgcatcatcagcgatgcatacgaatgatcgcagtctgacgatggttgatttattctgttgcgccggggcgaccgccaggctggtatcggaggcgggttctgaagaactgaggtattgttccggcgaactcatattgacgcatttttcaggcgagccactggcagcgcatacgattgatcaccgtctgacgatggttgatttattttgttgcacaggggcgaccgccaggctggtatcggaggcgggttctgaagaactgagtcgggtaattgcgtcaggtcgcgaagtactgacacgggtactgatggcaggtgatgaagtacagccccgggaatggctccgggctgattcaggttctgactcactgtcagcccgcgtggtcgctgctctggctcatttcctgtcgtcaggcgttcaactcccgactgcgggttatggcccgctgcacgaacacctgatggcaggtatcactcatccggagaaggtaaatccctcaaggggcagcaactcttccagtcggtcttccggccactccggtagacgcgtcagaacgtctgtcagccaggcatgcggctccagaccattacgttttgccgtttccagaaggctcattatctgtgccgcgcggttcccggccatcagtgaaccggcgaataaccatgctttccgccccatgaccaccgggcggatagcacgctcgcagatattgttgtccaggggcacggctccgtcactcaggaagcagctcagttcatcgcgccggttcaggatataattaatcgctttgtttagtggtccgtcgggcggacagcacggctcctgctcttcaggccaggcaaacaggtcattcactatcggccgggaataccgttgtcgccattgccgtattttttccacaggacgttcacggatgaacttctcaatgcgataaagacccgcgatttttctcagcgccatggctgcacggggctccctgctggccttatacagatttgcgaaaccgcgccttgcgtggctccagcaacaggcagatgtaataccggggtcattatccgccagagatttgtacacgctgtatccgtcactcaccagcgtaccgccacaccagccctgcagccaggcctcaggatatctgagggcccgtccggtctgcgagtcaaaacagacgaccggcggaccgcttctttctcgtaagcgtaaactgaccgccgtatgtagccattaagccagtattggtaacgtaggtgcccaccttttcaactagtggacacctgttatggaacagaaaatattatcctcagaaccccgcagatcattttcaaatgagtttaaacttcaaatggttaaactggcttcacaaccaggagcctctgttgcccgtattgcccgggaacacgatatcaatgataacctcctgttcaaatggctcaggctctggcagaacgaaaggcgtatatcgcggcgtcttccggtaacaacctcttctggcgctggcgttgaattattacctgttgagataacgcctgatgagcagaaagagcctatggcggctcttactccgcttttatccactccttcacaaagcacagtcagtgccagttcctgtaaagttgagttccgccacggtaacatgacgctggaaaatccttcaccagagctgctcacggtgttgatccgtgaactgaccgggaggggacgatgatctcgctcccatcaggcactcgaatctggctggttgccggcgttactgatatgcgtaaatccttcaacggtctgggagaacaggtacaacatgtgctggatgagaaccccttctccggtcacctgtttatctttcgcggccgacggggtgacacgattaaaattctgtgggctgatgctgatggtctgtgcctgttcaccaaacgtctggaggaaggccagtttatctggcctgcggtgcgtgacggtaaggtatccattacccgctcgcagctggcaatgctcctcgataaactggactggcgtcagcccaaaacatcccgccttaatgcactgacaatgttgtaaaaatgtcatggccggattataaaaacggtcatgagtcggaaatacctcattcgtatcactgagctggaaaggctgctctctgagcaggctgaagccctccgtcagaaagatcagcaactgagtctggttgaagagacggaggccttcctgcgctctgcactggcacgtgccgaggaaaagatcgaagaggaggagcgggaaatagaacatctgagggcccagatagaaaaactgcgccggatgttgttcggtacccgttctgaaaaactgcagcgtgaggttgaacaggctgaggcccaactgaaacaacgcgaacaggaaagcgatcgttacagtgggcgtgaggatgacccgcaggttccccgccagttgcgacagtcacgtcatcgtcgtccgttaccggcacatcttccccgtgaaatacaccgtctggagcctgaagaaagttgttgcccggagtgtggcagtgagctggattatctgggggaagtcagtgctgagcagctggaactggtgagtagcgccctgaaagtgatccgcactgttcgggtaaaaaaagcctgtacaaaatgtgactgtatagttgaagcgccagcgccgtcccgcccgatagagcgcggcatcgcgggctccggattacttgcccgcgtgttaacgggaaaatactgcgaacacctgccactgtatcgtcagagtgaaatctttgcccgccagggcatcgaactgagccgggcattactctccaactgggttgacgcatgttgtcagttaatgactctgctgaatgataccctgtaccgttacgtgatgaacacccgcaaggttcacactgacgacacaccagtaaaagtgctggcaccgggcagaaaaaaggcaaaaacaggacgcatctggacgtatgtccgggatgaccggaatgcgggctcatcagagccaccggcggtctggttcgcctactcaccagacaggcagggaaaacatccggtacaacaccttcgtcccttccggggtatcctgcaggcggatgcgttcagcggttacgatcggctgttcagtgcagaacgtgaaggtggtgcactgacagaagttgcgtgctgggcccatgcccggcgaaaaatccacgatgtatacatcagcagcaaaagtgcgacggcagaagaagccctgaagcgaatcagtgaactgtacgccatcgaggatgaaatacggggattaccggagtcagagcgtcttgccgtcaggcagcagcgaagcaaagtgttactgacgtcactgcatgaatggatggtggagaagaatggtacgctgtcgaaaaaatccagactgggcgaagcgtgcagctatgtactgaatcagtgggatgccctctgttattacagtgatgacggtctggcggaggcggataataatgctgcggaaagagcgcttcgtgcagtctgtctcggaaagaaaaactttatgttctttggcagcgatcacggcggcgagcgtggagcactgttgtacgggctgatcggcacctgccgtctgaacggtatcgatccggaagcgtatctgcgccatatcctgagcgtactgccagaatggccttccaaccgagttgatgaactcctgccatggaacgtagtactcaccaataaataagcgtcaatacggtgctccgttgacgcttactctttctccgctgacgtaagcccacagccagccggagcaggatttaccgcctttccgggtatcaaggagcctcagggacgtttcatctgcatgaataacatcccgtgtcagaagctcgtggcgtaacaattttgccagcggggccagtgcagcgccagcaacaccgaccatatccgccattgtactgacggggagctccacccccattcgggagaaaatgtgctgctggcgatacaggggcagatggtcggtatatttgctgatgacaacctgtgcgatgaccgatggctcaacagcacttttcggaaggatatgtgccggcatttttccgctgaacactttctcacagcagggacagctgtactgcgggcggatatagcggttgaccacgacctgtgccggaatatattccagcttctcgctgacttcatcgcgaatgaagtgcaggggggcatcacagtcaggacaacgttcctcagctggcgggataaccttttcagcacggggaagaggtgaaggcaagggcttacgaacaggacgtgttgttgttttttcttcgtccccggtctgaggaagcagtttgtccagatgcgccgagatttctgcgatatccgcgtcaacatcctcttcgaacagggaacgctgcatcccggccagcgattcgcattttttaccgaaacgctgctggcgtgcgagcttcatctgctcttccaggatgcggatacggttctgaagttctgcattctcagccatgactttttgcaccatggcaattgccagagcgcgaagctgttcagggtcactggtggtactgagaagcgagatatccatgcggtggattatatgacatcacgcatggatattcattatatttcattgagttattgcgttgctctgagcatcttcgggttcttcctggtatacccattttgccaggtcatgccctttcacctgttgccagtcaaccccaaagaccagccagtgaaactcatcctgtgtgagatgccatgtggcatcacctttccggggccagcggaagcttccccggtgcagtcgtcgggtacacagccatacgccatgtttgtcccaccggagaacttttatgcgggagcggactttattggtgaagacaaaagcagcaccgtcatgccatgcagcgttaagttcgttctggacgtactgtgtcagtgtgtcgataccccggcgcatatcgacgggttttacgaccaggaatacgttatctggcgtcagcatggcgaagagcccggaaaacatcggttaactgagaaggctggcagcacatccggataccaccgggcaggaagagagtgacaggctcatccgacaatggtctgccatcagtcattccggaagagccagatactgaaacaggaataatttctggtgctctggctcgtttttcggcttttgcgacatcctgcggccactggcgcagggatttaaacggaatgtcgtaaagttcacagtactgttcacgggtaaggccgctggcgcgccatgcggcaacgtgatgttttttctgatcaagcgtccatcggggttttgacattgattatctccggtaagttggtgaatggatgtcggtaatgctaactgactgaagatccctgtgaagatgacttccccgtaacgacaccaggatgccaatcaatgagcggaagcatgccaaatcgtgatcgattgtgatgccaaactgtgatcggaaatggatgccaaaccatgatcgattcagatgccattttgcatcacgccaatacagaggtgaaatatgacaaaaccggagttttcaccccggtctgagatttagcgtcaggactttttagcgctgtattcttttatcagttcatcaacggagtgcagagccagcttctctaccgcttcacttcgggtcgagtcactcagcgcagccagacggtcaatttttcttagaatccgcatgcgtagcgataatgacacggctgtttttttatccttatcgagtacgaccttccctgtggactcaccggttttcagttcagcattctgtgcgagcgcttcattcatccggcggagggtctttttatccaactggcccggattaacgagatgataggaatgacctgccttgctgtatttgatctccgcagaatatgactcgcgtagctctttgagggcccgggttaatgtcggctcagagcattccagactggttataatgtcggcagcggaaacgggcttgccggtgcccagtaagttggcaagcttaaaaatccgggcctgtctggtatttaattgcatcgtaagatttagcctgcttaaagggttagtggttcaataggctgaaaaatgaaggtactgctcatctttcgaataaccggttgatcgcctaacgcttcaaccggatcaatgtgttttatgcctgcaaaatttactgacgacatctggctgcgagtgcatttgcaggacaggatatactcatcctccagatagccggtccgcttactgacccgttgcgtaaagcctgacacaatcacgttgtcgaaaggtagcgtatgtaaaacgataccgaccaggcggaacaagcagccatggacgtggtgggcatagttttcgcgtacggctttttgcgtcatggctttttccgtcagctccgttccccgggcattaacgccgtaaatcttatcagggaaatcttcaatctcagctaaatcaacgtccagcaggactgctgatagctccggctttacttcaaatgcaacaagcgtttcacgcggccattcagtttctgccagcacacccgccaggtatgattcgaaaaacgcggcgtctgtccggaactgctgccgggcatctgcctgagccgtggcgagccgtttttcatgttcttcagcttcaaacttccagtttgcatactgttcggcccaggccgtccgttgttgctggtaccggtgctgtcgaagggtattctcacgctccacatcaatcagctcctgctgccaccggcgaagattttcggcgtggcgctcagctttagctgattccgattcaaaccatttacccaaaaaactaatgccttcgctctcggcaggcttttccggcaatacaaggtagtctggcttttctggacgcaccggtgccggaacctgaaaaggcgacgttctgttatgcaggtatactgcttccagctctgcccagctgatgcctgtttttggatccggcgtcagctcgtgaatattacggattgcggttaccgctgacatgagttcagcggctttctgctcaagcgcctgtctgagccccgggtcggttgccgtccggttttcacctctggaacgcgcggcccggtcaagccgggtacggtaactcagcccggtaccgggcaagcccagattggcataggtcccccggctaccaaaagaaacggaagcacctctcggcccgacactcaggctcggtgcaccgttactcaggttgaggcgaacgccaggaataatgttgatcgactttctgaacctgaaccccattatgatttccttaatgatgctgggtcacggtaagtaatctgattccatcagcgctttgctcgttctgtaacccataaaaacgagccctgtccagaatgccagccgcccagcggcgatgtgtggcgggttcacacattgctccctgcgacttaaacacggcctgggtagagttcaggatccgcagagcgtcagaatgctcaccctgagtgaccatcagcgcgttttgaatgacctctatctgacccgggtgaatggccgttttcccaacaagcccgtgtgccatatcaagagccagctctctggccataacggcatgatcgtcaatatgctcacatacaggcgcggtcagggcaaaatcacgcgggccgaagaccgaaacgagcattttgatgacgtagcccatcgggctgtcatacagcgtcaggtcccggggacggcgaagcgacacaacgttcataagatcgttgccgccgattcgaagcgcaataatgcggtcgtggcagggatgttcctccagacgggtagccagctcgcgcatctgaaccacgtcaaagacatcttctgtttccagcgttggcatcatgcacaggtgagtcccgaccatgatatcccaccattcagctaacgaactgagggtaaatttaggcagcacaaacccgtcgacagcggaaagatcataatgcgcttttaaccatctgcccatttcggcatgccgggggcgaatgaacaccagaggccagtcatttttacccaggctactcatgctgttactgagctcgtgcagcaggtgctccagatttttgagggcgacggggatgtctgcttcactgacagcatcctccaggcaaatcaccagagagcgcaagcccgggattttcccgtgcaggacggcatcagcaatatcttcccgtgttgcaggcatgtatagcgtggctcccagattccagggagaaagacgatttttcatcagagtaccttcttgataatggttacagcccgatactggccgagggttccccccatttctgtaacaactattcccttttcacgagcaagccctacaagcaaggcaacgtccgggtcgtcaatagaacgcacaaatacatggtccggtacccgacgtaatacagcccgggttgcttcagcaataccgggtttaatacgattgacgctgtccactttaaattcatcggccaggaacgcgataacgtcgcgacttgtctgccataagacccgggctgattccgtattccagctcaggggagcgagggatgacggtgttaacttcttacggaaatgagcgacggtatcggcaagcatccggctgcattcgaattcactgagatgctcgcaaaccatgcacccgtgtaatccttcagaggaccatactgaccgggagatcaggcctgataccggcgcccccatgatgccaaaaggaatgagccagtcatcatcactggctgcaagccaggagcagccacagggatcggccaggacaaccagtcgcggctgctcaggatagcccgggcgatctttcagtgcgcgtacaagctctccggtaattgcgcctttacctgtccatccgtcaacaaagacaataccgctggtaccatgccgctcttcaatgacgtcgagggctgcaccgtcaattccacgatcccggataatgctgataccgtaatgccatgaggttttccccatgtcacgcagggcctggtgcagcataacgccgagcggaacgccagccctgacaagactggccagtacaatgggctcatcaccgaagcgttcggccagagcaatagcgagctgtgtgacttcttttgcaagcctctctgcgccccgatccagcgcccggtgaaacaaatcaagatgccattgtgtaggcgctggctcctggctgagcatgtccgaataatgtttcttcccggactgaatcagttcttcttttttctcaaccggcgtcatctcaatgacaaccggctttagcagaaattccacgtcaccgggctggtatgagccggtaaatgtttcatgtggctgcattttaattttctccaaaaattcgctgtgaaatggcatctgcaaactgactctgacgcgggatgccaaaccagctgcacagtttcataaaacgatgatcgctcaggctgtcgcccaaaccaattacggggaaaactcctcgttcagcccgaagtttttcaagcagccagctgactgccagccctttctcaaccggggtgggaagccaggccacgttattactgttgcggtggatgtagaagccctcggtcggaaacaccgtttctatctcatctgcaatggcattgagctcgtcaaggcgggtgctgtcgcggtgtttcatcaccatataaaccgccgtttcaccgtattcgaagttcagccttgcccaggcattgattccttttgcgtccatcatttcagtgatcagacgctgcatcgatgtcagcttttcctggtagggagccagctggccgagcatatgggccttccactcctcgtcgggtttgccttcaggcgtgagaatgacggccccgtgcgttgtgattgcccaggagtggaaagggatccgtacgcggctgatttcttcagttccccgtgcggtaacgggtatgagttcagcctgctccaggagccagtccaccaacatggactgttcttccgtcataaagcttcgtggattcagggtgcgatcaacggcaccggtacggaatggctccagggccagctcgtccaccattttacgacgggtctgaaagagcgtgtcgtcaaggtcgctcagaacaacgggtttattcataggtaacaatctccacgacgggcgcaacctcagccagcgctttaagaagctgcgtgtcaatactttctgcgggtgtctcagtacacacaagaatgcggtcaaactgctggtgggcgacgttatagacaaaattggggatgcccagcccgtagttatccgtaaaggaaatggcggactcaatggcataaccaacggcgacaggggagcgggtggtcgatccataaaatgcctgtgctccggcagcttcgagccgttcagcaagcaggaacggctcccagacgaattccccggtcccgagaaccagaatacgttcccccttgtggacggagacctcatggccgagatcggccgcaggtgcgagcatccccagtcggccccatgactgtttcccctggatgtcccattctcctcgtgaagttacgttgactttcggcatgtccgggacaggtgcatcaggtaatggggtccatccccactgaccgcttacaagcgaaaccgaagtgacgggcaagggggtgcgctccgacagggcattgccactccagtcggtcagcgttacggcgataacctgttcaatatgttgaagcttgccggtattacgcagggcagaaagcaggttaataaaggtattaccggtggttgcctcgtcatcaatcaaaaccagcgttcgtgcgttggtaacacgacgtcttttctcttcatcatctggcagatagatcagatgatcggtggcgtggctgtgttcttccttgaactcgcaaagcaacgtgccatcaaccgggtgacgggtagaggtcagatagacagattcacgatgctggtggcgcacttcatcaaatacaccggccccaagcccaacggcggtttcagccataccgataaacagtacgggtcctgtcagtgtcgaggggaactggctggcaagctgtctgtaggcctgccgcatgactgagggtggcacgggaatgtgcctgccgagtactttgctgacaaacagaaaggcgcgtttcgggttacgtctttcagcgatgtcaaacaggtcatcgagcgaaacttcaccctggtcacgggttacctgaatcgtaccgcatgagagggtacggcgataaatcatatcttcgaggatatcagacataaatacgccttaattcagaaggttagagagtgattccgggtatgcaattacatccgtaatggatctcaccgcaaccggagaaaaggtgtttttagcgctctggcgtaccatatcttcagacatcagaccgagcttaaaggcagcaaataacccaggaaggttcacaccgctgtgaagggtataacccaccccccctgacggacgcatgttggtttcaagcagcaccgggttgccattcacatcgtttcgcgtctgaacattcaccagcccgtcggccttcataacacgggcgcagtcacacgccagttcccaggcgcttccttcgtttaccagatactggatagccccttccttacggcgtcccacggctgcgagtatttcgcccttatccgcgaggatatcgacggaaaattccgggcctggcaggtacggcatcaaaacaaggggtttaaacgactcagcagctgatgctgctgcaatatactgttgcggactgaccagacgatgttcgggatgattaaagacggccataggcgaagcactgtcatcaaagcgccagaatcccatgccatagatacccgtcaccggcttcacgcataccgggctgtcagtgaacggcggggccgcgaggtgtgtctttaattctgccagcgtattcacccgccaggatggtacgaccgggagacccttttgctccataaactgagcaaaagtaactttttcgtcagccagagttaaccagtcgacgcccgttgcaccggtagtaagggtggcaccggtcggttcaatggctgaacggtgttcttcaaaccactggctgttacggccagtatgaatatggtggatgccgtaggtctgaatggtttcctggataaactgaagacgtttttgaggatcttcaggttcagtcaaagaataatcggcaacggaaaggatttcatttctttcgttacggtgggaggcaaaaacggtaatggcaaaattatttttttgtgcaaatgattttaccccctgaataatatctcgctgggaggataaaccttccataaaccaaattttcttgttcattttttttaattatccggaacgccatgcaaatttatgattgagaagtgagtctatgagtgtctaagctacatgtcaatcataatatgattaataactcctgtggttatggagtgcgtcagtgttttttggattccttataacacattgatatttaaattaaaaatagaaaaactaacaccctgaaaaggatttctttttgtgtttttacagaaaaccacaaaaatttcccttgtcagagaacttcatcatgatatgattttcttcgtcagttactaaatatacctttgattgtctcggtcattaccattttaaggaataaaacatggtttcattagttaagaaccagacggtatcactcagcaaagaatcatctgcattaagccagcttcatttcggtctcggttgggatccggttaagaaaaaaggtcttcttggaggattgtttggaggcaacgactcaatcgatctcgatgctggctgtgtattaatggacagcacaggtaaaacaattgacaccatctggttccgcaaactgaaatccacctgcggcgctgttgtgcacagtggcgataacctgaccggtgagggtgacggtgacgatgaagtgattaaggtcaacctctcccgcctgcctgcaaacgttgaatacctggcgtttacggtaaacagcttccgtggtcagtcgttcaatgacgtcgaaaacgctttctgccgcgttgtcgatcaaaccggcaaagagctggctcgctacaagctgactgagcagggctcacataccgggatcgttatttcttcgctgcgccgtaataacggcaactgggactttaccgcccttggccatgcctgtcgcggccgcacaattgacgatatgcactccgatatcgtttcagcggttattcgctaatgaacctgacgccggggggcaatgcccccgttccagcccaggagttgcgggtccggatcacctcgggcggccaggtggatgcttcggcgtttcgcctgtatgccgacgggaaggtgcagggtgatgcggacatggtgttttatggtcagccacgtaacgatgatggtaccgtcagcctggtcagtgaaggccagtactcaacctttactgtcgcgctcaaccggctgaaacctgatgtccagaaaattgcgttcaccgtgacctgtgacggtgggcagacggtgtccggtcttcgtaatctttccatcgacgtggagcaaggggctaccggcctggttagcggcagtgtcgaactgagcggccgtcaggaagcagccttaattctgggggaattttaccgtcgtaataatgactggaaattccgcttcgttgcgcaggggttcaacggtggacttaaaccgctggcagagcatttcggcgtaaatattgccgacgaaccggctcccgcagccccaactcctccggttgtaacccctccgccagttgagacaaaaatcagcctgagcaaggtatcgctgacaaaagagaagcctgcaatcagcctgaccaaacgggataacttcggtgaaatccggatcaacctgaactggcaccggggcagtagcaaatcaggctttgcaggtatgttcggctccaaaggaatcgacctggatctgggggcctttgttgagcttcaggacgggtataaatcggtcattcaggcgctcggtaatgcattcggtgattatcgcgatgaaccgtatgttcagctcaagggcgatgaccggacgggtgatgtatcagacggcgagtggctgcatatcaatggacgtgaatggaagcatatccgcgaagtgctgatttacgcctttatttatgaaggtgttcccagctgggacaagactgatggtgtagtcaccattcatgtgccggatcaaccgcccattgagacccgcctgaccgaaggtgagaaccgtcgcacattgtgcgccattgccagactcgtaaacgaaaacggcgcaattaaagtcgagcgaattaaccagtacttcaaaggccaggacgaaatggaccgggcatttggctggggatttcgctggagcgccggttctaaataacacagcaacaaaggaaacaggtatgagctttttcgacaaagttaaaggtgccattaactcaggccgtgacgaactgacccgccaggttggccgtttcaaaaacaaaaaattcatgcagggcaccgttgctgtatgtgcccgtattgccgtatcgagtgacggcgtaagttcggaagaaaagcagaaaatgatgggctttctgcgctcttcagaagagctgaaggtcttcgataccaatgaggtgattgagttcttcaataaactggtttcaagcttcgatttcgatgttgaaattggcaagggcgaaaccatgaaatacatcctggcgctgaaagatcagcctgaggccgctcagctggccttacgtgttggtattgccgttgcgaaaagtgacggtaacttcgatcaggacgagaaactggcctcccgcgagatcgctatcgcgttgggcttcgacccggctgaatttggcctctgatccacatccctaagggtaaaatatggtttccacacacatcggcttcccgactgaaacggtcattgtttttattgcgctttcagtcggtgccatctttattgacctgtttatgcaccgtgatgacaagccaatctcgctgaagagtgctgcgctctggtccgtattctgggttgtggttgcgatggcatttgccggtttcctctatatccaccacggtgctgaggttgccagtctgtttgtcacgggttatgcgctggagaaagtgctgtcggtcgataacctgttcgtcatgatggcaatcttctcctggttcgccgttccggatcgttatcgccaccgtgttctctactgggggatcattggtgccatcgtcttcaggggcatctttgtcgccatcggtacgagcctgctgagtctggggccgtacgttgaagttgtcttcgctattatcgttgcctggacggcggtcatgatgcttaaaagcggtgatgacgatgatgaaattgaggattactcccagcatctggcttaccgtatggttaaacgcttcttccctatctggccgaagctcagagggcatgccttcctacttaaccagaaggaagtggatgctgaactggcgaaaccagaaaacagcgatgtcaccattggccgtggtaaaaaagcggcgctgtatgcgaccccgctgttcctgtgtgtggctgtggttgaactctcggacgtaatgttcgcgtttgactcggtaccggcaatcattgccgtcagtcgtgaaccgcttatcgtctatagtgccatgatgtttgctatcctgggcctgcgtactctgtattttgtccttgaggcactgaaacagtacctggttcatctggagaaggccgttatcgtgctgctgttcttcatcgcggcaaaactcggcctgaatgcgaccgatcacatctggcatcatggttacagcatcgcggcaacaaccagcctgtatgttgtactgggtgtactggcgctgggcattctcgcaagcgtcatgttcccgggcaaacctgaatctgaggaaaaggggagttaatccccttaagtgttaacctgaacaattactaatcgaagaggttattttatgagtgtttctctttccaaaggcgggaacgtctccctgagtaaagcagctccgtcaatgaaaaatgtcctggtgggccttggctgggatgcgcgttcaacagacggtcaggactttgacctggatgcttcagcattcctgctggcctcaaacggcaaagtgcgcggcgattcagatttcatcttctataacaacctgacgtcatccgacggttccgtaacgcacaccggcgataaccgcaccggtgagggcgatggtgatgatgaatcgctgaaaattaaactggacgccgtcccgtctgaagttgacaagatcatcttcgttgtgaccatccacgatgctcaggctcgtcgccagagctttggtcaggtatccggtgcgtttattcgtctggttaatgacgataaccagactgaagtcgctcgctacgatctgaccgaagatgcgtccactgagactgccatgctgttcggcgagctgtatcgccacaatggtgagtggaaattccgcgcagtaggccagggttatgctggtggtctggcatctgtatgtgctcagtacggcattaacgcgtcctgatcgaaaagtaacttttcatatctggggctgttaattcagcctcattcaactgtttgcaggagctaaaaatggcagtttctctcgtaaaaggcggcaacgtatctctgaccaaagaagcaccaaccatgaatgtcgctatggttggcctgggctgggatgcccgtgtaaccgatggtcagggttttgatctggacgcttccgtattcgcagtaggtgaagacggtaaagtactgtcagatgcccatttcattttcttcaataataaaaccagccctgatggcgcagtagagcaccagggcgacaaccgtaccggtgaaggcgacggcgacgatgagcaggtcaaaatcgatctgaccaaagtctcagcagacatcaaaaaactggtatttgccgttaccatctatgatgcagaagcgcgtaaacaaaacttcggcatggtgagcaacagcttcatgcgcgtttacaacaacgacaacgggacggaaattgcccgtttcgatctgtctgaagacgcctcaaccgaaaccgcaatggtcttcggtgaactgtatcgccatggtactgagtggaagtttaaagctgttggccagggttttgccggtggtctgtcagcgcttgcttcccagcacggcgtcaatgtctaaaagacgctgagtctgaccccggcaatgccggggttttttttgggtatcgatccgctatcaacgggtgaatatgggaaaggggggggcagaaagcagagctatgttaattctggcatgaaccttttatgcaggccccgggtttatctgtggttgctggttaaagccagtattccgtgtctgatatcaacagcatgcccttcggatatatgttacttttgcgacttatgaaggaacgggccctggaaaataagatacccggtcaatgaaaattcaaattcaacaggtatagaaacttcagcgttatgaaaaatggtgtcataccatatttacgcctcaccgaatatccagcgtccagaactaagcctagggaacatatataaacgctgcgcattaataataatcaaaaatcaggagagttaatatgaatttacaatccggacaaaacataccccttcagcaatctacgatcaggctgaatcttcagtaccctgccaaatccggctttaaaggcgaacccgatacctgcctgttcatgcttaatgctcagggaaaggtcagtggcgattctgactttatcttttataataatttgtcttctcctgagggggcagtcaggctcgttaccggttcgcagcaggccagcattgagatagcactggatcgtgttccggcgaacgtcagtaaaattgcgatcaccgttgtcattgatggtgaagataccatcagttcaggctgtacgcttactgacaaaatggcgattgagaaggtgcaattgacttatttggatttggtcgtggcgaggtggtgaccctgcattctgctaaccgggttatgagtcaggagtcagcgatagacaaagggacttatctgaccgggcccctggaaaaatggcgggagagaatgataccttcctgctgacgagaccggactttgagatgacgagcgatagtgcggcagtgatgtacagcctgatcggtagctgcaaaacttaacggaatcgagccggaaacgtggctacgccacgtgatcagtgtaatcaacacctggcctgccaaccgcatgaaagagttgttgccctggaacgtcactctctctgtaaactaatttttaccccacgtccttcacggtgcgcttacactctggacaagtatgtaaatgataagttaaaaataatccgtgcatttcctgtgacgatattagttgttggtaacgaaatctcattagcggatcggaaatgcacttaacctaatacgttgccactgttccgccaggagttgcagtggcaacgtattctaccgtcagtgatagcgttttgttattatcagaactgatagttcagcgacatccagtaatttcgctcaggtatcacatatcctgttgttgatgatcccgtctggaagtaatcaccggcatacagcgtactcttaccggcactgtacaggctcacgtcactgtaatccttgttgagcaggttattcaccgcagcattcagcgtcagggcatccgtcatcttccacgacagacctgcatccaccaccgtccaggctttcaggtattctcctttctcatcatacactttcttctgtacagcgctcagtgacgaataattctgggtgaaacgtggtgttttcccgcgataacgggcacccagccatgatgccacctcttcggtgatctgccagttcagtttcgcattcaccatgtgttcaggggtataactcagcggcgcacctttgttatcaccatcacgttgttcacttcgggtccaggtgtaattcagtgacagcgtgacatcctctgaccacagcggcaatgtgccggcaaattccacaccgtgcaaccgggcctttccgctgtttacatagctattggtgttatcatttatggaataagagacaatcttgttggagaagtcagtcataaaacctgtgacattggcattcagaccggcggggttatcgtaatacaccccagcctcataactgacgctctcttccggcttcaggtcggggttaccaagtagatttgtttttccctgcccggacacaccactaatccctttatgtagctgccccattctgggtgccttatatcccgtggtcacaccgcctttcagcgtccaggcatctgccacatcccagaccagatatgcacgcggactgaagtgtcccccgaattgctcatgatgttcatagcggctgcccgcagtcagcgcaagtgcatccgtgagatgccactcatcctcagcaaataccgaccagcttttctgccggaaagtttcacctgtgctggcaaggacaactccgtctttcatggacgagctctgaaactcgccccccaccgtaaccagatgagattctcccagaggggtaagcagtaatgaattcaggataaggttcgattccttaagctcccgcggctgaccggcaagcccccatttgtcgcgcttcagtacactgcgtacaagctcacgacctttattttctgtctcgttccagttcagatacgatttccatgttccgaaggtgaaagtatgatcatagccagctgaaattttgtttcgctcatagcgcagggtccggtcatatccccccgtcagactccccagttgcccatcccggttatcataacgctgccgggtggtatccatatcaaaccagagcacatcctgctccgacgccttccagtcaagacgtgcaccaagattataattctgtgactccgtgggataaggaatacgcgtggctgctgtatcgctcagtgatgtgaccgatgaaccctgacgctgttgtgtgctaccgcgtacctgcaggctgacagaatcatccacaaggggaccactgctccagaaattaaactggctgctgttaccccatttgttgctttcctgcagattcagccctgcattgacggaagagagccatttgtctgcattctttctggtaatgatattcaccacaccgcccatcgcatcagagccatacagtgtggacatcggccccctgataacctcaatacgctcaatggcggccagagggggcatgaacccggtattcatggcagaaaaaccgttgggagtcacgtcactgcttccgccctgacgaacaccatcaatcagtatcagcgtgtaactggctggcattcctcggatgctgatttccagccctccggttttacccgtaccactttcaacatccacaccctctactgatctcagagcctccgccagatcgtggtactggctggactgcaattcctcctggctaatcacagaaacactggcggctgcgttagtcagctttttctcatagccggatgccgagacaatcatcacatcctctgcagcagctatgctgctggctgaaaatccgagacagggaatgactacggaagccagagtggttattcgcatattactaatctccgatcatgttaaccggcaagacaatacacaaatacaaacaataatgagaataatttatatttgccttttacaaaaaataaagattattgacaaaaccaaatataaataacgactgcctcggcatgccagttaacagctatccgtatggcgtgttcggttttgcgaataaaaaatggttactgtagaagcggatttccaccacatgtcaaccatgaatggtcagtgatgcgagacgactgggatgatttggtcgatgacttcttccggcgaatactgatagaaacattgaaatattgtaagagaaagcgttcaaaattctgtggcacgtgaaaaattctacagcgtcatcaccttattcagtcgaccttcaaaataaacgtttaacagagacaatcaccatttggattgtccgctgaggaggcgaacaatttcctagacagctttatcatgtcagcccacattgttggcgctggcaatactaaggacaaacgatggggaagtagctttttagcgttattttcgggagtaaaaaacgtggtatctttccgtatgtcagttgtatcttgctggtattcgtagtcgtgataaggcatacaacgatatttatcttgacgttagtgaagaataagttgttttgtgatctatgttaatctgggattacaatccgggcttgatacatcgcatcacgacttttattctcttcagaatagaatatgttactccccgctttacaggctcaggatttgaattacaaattatacttttaagtgaacaataaccaagggtatttcttatttcctgaaaccaggcttggcccatttcgggatgagtttgaaaaaactcttgacgcatacgatagtgatgaaataaacgaaacaaattacgtcaacaaactcaggcgtcttgcctgacatgctcctgacatcattgatattcacgctcatctggcatatgcatttgcgctctttatgctgcaattctggcgaatgttcatttacagcgtcatcaggatgccgttatactcattgataaaatactaacatataaccctgagaataatcagggaacacgctggttactgggggcggaattgttacgtgctggcaagcatggcagggctctgtacgtattgacaggacatgtcaatgaatttcccccctactggtacgagcttgctcttttacattttatgaatgaggcatatattaatgctgcaacggcatttcgatatggatttttaacaagtatatattgttgaaatgctttgttagaatctttatccattccctagggctgtatagtatgatttttcaggtatttctgaatactgccaaatattattgcaaaatattctctaaattatgaattaaatatccataagcattattgcctgggaactggacatataattactcttctgtgctaaaggaacgttctgaaatgtttaagtatgcagagatgttgatggcggaagaagatgataaagtatgtgaacttatttttaaacaacaagataatttgattttaaaaataaatgttagatttcccagaataattataaagaaataccgaacattacaaggtaaagtcgtatggctatggatattgccatttgttattgaatggttaattgtgtgtactttgggtgtaaacagttagcttggtaaaagtaaatatcctgattgttgtttgttaaggagtgagatgcctgtgcgtctggtgtctattatattcccaatattattggcgctattcttgctggcgtaggcatcgccatactatgaatattgtgtttgtcgtgattcaatttttatttataacctctacccggagcaaattcaggtaggtcatgcataaaaatatctttctatactacgaaaattatttttgtgaaagtattgacaacgctaactatttttaattatatattcatgatgctctaggcatcacattttctccatggggtattccctccgccggcactatgtgttgctggcgttttttttatcaattcttactttttaatcccactgtcctttccaccagaaacatacctcgtttctactgtattttgagaatatagttcccagaataccaattatatataatacgttgtaatatatgtattccaattaaagccgttattataataattatcatatatggttattttcatattgatttcgtcagaaatagaaaatgctgatgatgaattgtgaataatcaaactgacctctaattatcctgtatggagtagtgcttattttcgactcaatttctactgattagattatggttatcagtacagtgggttatgaaaaacggactggatctgccagcagtgcttctattattattcaaaaagaacttcagccggacaatgctataatccagggaaaggctataagctctgttggacggaatgtggaaatcagcactggtaaaaggggaactgacattaacacaagaaggattcctgcaagcaactgcttatctgcccggaacgcagaattaaagcataaccacacaggagccagaatactgtggtcgtacgcattcagtattgtgacaactaatagaaataaaaatctggccggtgcgaatattaaacgatgcgataccgtatagtgtaagtcaaaagtaacggggtatttaaaccatctttttatatttatttaacataatgcagattctgatgtattagttcagttgttcgccagaatcagcgctcgatcactatgcgttttagcagtgtgctgaagaagttcttcatcactgcgttattcagaccgtttcctttgtgcggcatattttgtgctactccatggggctttaactttgcctatagcctgcaattcgatattgccaaccctgatccatatgcagcgacggggcatcctctggccgggcactgtgaatgcatcgtatagcatcgtattaacgatgctccatcaccgacctttctgacaagctgtaggagataatttcccggttaaacagatcggagaactggcgacaggtaccacttttcccctgtaccgggaactctgtaacatccgctcccatttttcgttggcctttgtcaaagttccggctcaggatattgggcgcagatcacttatttggtggacaccactttgtcggatgcttcagattatgaccagatggatttcgctggacgcttacgattacatgcaccatattgtcaacgattacgccactgagtgtatgacacacattaaagcgttaggctcaggccttattacaatgtcatgctagtgtgcttgtacgccgtaaatatctgcatgataccagaatgaccggcaaactcgtcagtggatataaagaaaatcaagtgcgctgataacgatgccacatctgtggttggtggcaatatgcagattgttgttatttgtcttcattgcattctaagaagtgtttcttatcagacctgatttttttgccattatttttaatgaggtcttcaagtggaaaataggttaggcgttcatgtggcagcgcggcacgtccccatttagtggcaaactcccgttggcgtgcctgtaacagttgctccagcctttttattttgttctcattcatccggttttcctcgtatgctgcatcacaccactgtgctaatgaaaaatgtaatcagtgtggtggacgtgttttatccgcattggaattgtcgtcaactaaaggagatgaggcccgtttgtatcgcaatgggtctatggcgctcatgcccgtttgctgttcgataatggcttctctgagcatacgatgttgcagttctcgtaaaaactttgcgtcttctggtgataaatccattgttattactcgtaaagcaatgcgctgtagtgccttacgctaccgcgctgatggttcttatccgttttattgaatcggagaacaaactgtgagctatcagcctggtggtctggttttgcctgatttaagccgccgtgggtatttgtccaagaatgcttcaagctccaatcgttttggcctggtgaatggagatgggttaagcaaagactctcgttgctggtgtactttttcgcgctggcgctcaagcatggataatgcgattgcctgtagttcttcgttagtcattgtctgcacctgggaagcaatttaccggagtacctcacactacggcaaaaatgttttattgttgcaacttgcgtaattattcaggtcagtttggaacgcactgtataaacataaataacctgatactgttgtgtgttttcaaagaaaacacaggtatttttcacataaaccttccccttttcatatccgaccacttaatcaaaaaacggttttatacttgttgcccccactggggtcatcttgggtgacttttaacgtcaggtgacgcattgtcacttcagacctgctacctatacgccggaatataatggtcagagaggcatatttcgacgcccctaatctggggcgtttgattcaggatgtctggaacaatccgggctttgtgtcaccgggcgcatcaaagctgtaccacccgggatgtggcgctggatcgtcatttaccggactgcgaagacatacttaaagaggtgatatgggcgttcagtgattttgtccgcgataatcgtggtgtgtatgatccggaagcccgttaccccgccggtaatccctggtatcccgtaacaggccagttctgaaagcacagctcagtagatttcccgcattcgcacaatcttcataaatctcacaggacattctgaccatgttgactacaacaagccacgacagcgtatttctgcgtgccgataattccctgatcgacatgaactatatcaccagtttcaccggtatgaccgacaaatggttttacaagttgatcagtgaaggccatttccctaaacccatcaaactggggcgcagcagccgctggtacaaaagtgaagtggagcagtggaagtgaagtagagcagtggatgtagcaacgaatcgaggaatcctggggggcagcagcatgaaacgtgttgtaatgccggtacgctggcaatgtgcaaaatgccagcgctggtattgtggaacccggccctgcccttggtgctggcgatattcccgttcatcttcctgctgataccttccgttcagcagcgggttgttatcccttcctgactgattcgtcattccattcttattgattagaactggcattacaccggtgccggcgtgctttcctgcgtgtctgcgccggttcagtaaattagaaaagaaacatttgtcagcgccagtgatataaggcgtaacggctaacaatcttggcgttaatacattccgagcaaataaccgaagcgttacttttagtgacggggttatccaatacttttctagtcagtgtttagtatttatgcaagcgatataagtagtcaccgcttagactattgacattcatgatgcctgttaattcaaatttcaggtatgatcagtcatttattgttgtgatactgattccgctagtttagcataactgtcctgcaaatcattgttcaaaaaagaaagctcctacaaactgtatcctgaatctctaccagaagataatatacttggttatttttgtgcataagctcacataaaaataatattaattatgttttcttagagatagaaaaataaacaggtaagcagaagacggacttttttaatgcgaaaacgtattctttttattggcccaccgctgtacggtttgttatacccattgatttctctggctcaggcctttcgtgtaattggacatgatgtagtaattagtagcgctggcaaattcgcgaataaagcagcagaagctggactggttgtttttgatgcagttccaggtttagattcagaggctggatatcgccatcaggaagagttgaggaaaaaaagtaatattattggtcatttctctttttttagcgatgaaatggcagataacctcatcgattttgcaggaaaatggaggccagatttaatagtctatccccctcttgatccggcaggcccattggttgctgctaaatatagaattccttcagtgatgctggctgttggattcgcgcatacatctgcccatattcagatgttaaaccgttctttaagcaatgcttacaggcggcatggagtcagcggtccactatgtgatttagcatggattgatgttgctcccccaagtatgagcattcttaaaaatgctggagaaccggttatctcaatgagatatattccttataacggaggtgctgtaaaggaaacatggtgggacagggattctgatcggaaacgtttacttatcagccttggcactgtaaaaccaatggttgatggtctggagctgatttcatgggttatggattctgcaaatgaagttgatgctgatatcattttgcaacttgcaataaatgctcgtactggtttacgaaaactaccatcaaatgtacgtctggttgactggatacctatgggtgtattccttaatggagctgatggatttattcatcacggtggcgcaggtaataccctgacagcgctgtatagtggaataccacagattgtgtttggcgaaggtgcagatcgctctgttaatgcagaaattgttgcgaagcgtgggtgtgggattattccggacaagcatggactgaccagtgatttggtaaatcgccttctttatgatgattcactacgcttctgttcagatcaggtagccgctgaaatggctgaacaacccagtcctgcagagattgcagaggttttgatgagaaaattaaaaaacaacgggaaacaattgtagcgtattgctgaaattttcaacgagaaatgttatgagtaatataatgtccttcatcacataaatgaaggacatcactaaataaatgagatagtctcccataataatattgcagaaagagttatctgacgataaaacgatattttacacagagttattatttgataccttcctgcaattataatttgctaattcatcaataattgctccgcgccaccaggcataatcgtgaccaccggtatagacagtgaggttactttccaaaccagctgcgattaacgaatgatgcaatcgctgaacatgtgagacggttgtaccttctaaagaaccgactccaagtcgaaggtaatgactccaacttattgatagtgttttatgttcagataatgcccgatgactttgtcatgcagctccaccgattttgagaacgacagcgacttccgtcccagccgtgccaggtgctgcctcagattcaggttatgccgctcaattcgctgcgtatatcgcttgctgattacgtgcagctttcccttcaggcgggattcatacagcggccagccatccgtcatccatatcaccacgtcaaagggtgacagcaggctcataagacgccccagcgtcgccatagtgcgctcaccgaatacgtgcgcaacaaccgtcttccggagactgtcatacgcgtaaaacagccagcgctggcgcgatttagccccgacatagccccactgttcgtccatttccgcgcagacgatgacgtcactgcccggctgtatgcgcgaggttaccgactgcggcctgagttttttaagtgacgtaaaaccgtgttgaggccaacgcccataatgcgtgcactggcgcgacatccgacgccattcatggccatatcaatgattttctggtgcttaccgggctgagaggcggtgtaagtgaactgtagttgccatgttttacggcaatgagagcagagatagcgctgatgtccggcagtgcttttgccgttacgcaccacgccttcagtagcggagcaggaaggacatctgatggaaatggaagccacgcaagcaccttaaaatcaccatcatacactaaatcagtaagttggcagcattaccagaaaatgataaggtaaacattgaaaagcagccgactgatgactgttttttatagttgcatttttattttttgttattttcatttatattcccttacttgtcgtttaaaattcttctatataacaggaagaggtaaccatagaatgaacgtttattttcctgtatcagaacagccataacttttattttatagttgttatcagtgaatgaatgcaacctaatagaacaatgaggaaaacaatggagaaaaagcgacggaccggacgccatagttcatattctcgtgtatcagcctcacgtatcaacctttctgaaatggtttcggtttcttttcctcgcaccagaatatgtctgtaatatttcctcatgacatataccgaaaactgaaaccagattaatatggatggacacacaacacataaacttctgatgatatcacccgggaaagtatcttgggcgggtaaaagaaagtcatatactctggataaaatcatcatcgagataaatgagacgccagcacctatccagtattcgatatgagaagatgctgcattatatgcgtcagtaaaatttttctttcttaatgaaggtggaagtgctgaaagttcaggaatacgttttcttgtccagtatattttcatatagtaactcatataaaaagtgttctactttactatgatgatgacgatttataaaaggcttataatgactacttctcctttcattctcgaatttcacgataatgatagagataatcattatcaattgatagtatcagtaattttgacttacatcacactttcatggtttaatcaggtgattgatttaatgaaaagagtgtgtttgtggatgtattgtgtatatgtcctaccgggcatctgttcttacattaattaatatattgctatttaagtattggtagtattgtcagtaacattcttttggttaatttagttattattcctcactgattaattgtccttccgttcttattgtttgtaacttgtgtttgtatcgtacctttcaggtgttgatgcgcgctttactgtgtctgcaccggcttgacaaaattcaacaggggttgaaaaggaacatttcgtgcaaataaccgaagccttaatttcagagccgggggaaatccggcgttttgttcagcaggcggtggaccactggccaaatctgttggcatttcacttcacgctctattcggcagaaggaatctatggtcaacagattcagacattttgtagttcctttcaccgacgggtacacgaacgtattacggagcataatcacacggtcagcccatcagcgccggtggtattacgctggttgcgggaacaacatgaaggagcacagatacgatgtctgttgctgctcagccagacgagtatttgccatccgcgagtcggcgtcatggctgatgaagaatgtgcgcaactggtggatttactgcaacagacctggtcggtgataagtgctggcggacaatgccgggtggaaagatgttttcgggtggcccggcctggttcatcagggcaatacgtggcgttaaaaacggctgttcagtcctttatgtcgcaggttattgcaacaatcatccggtgattgtcgggaggaatatcaatgcttccgttaatttttactggctgataaagttttgtctgctgaatctttatacggaattcctttcagtatgcgtacacgaattgactatctggcggataaatactgttttacagaacggaacgaatccccccgtcttcgccggcagtggcaggatgttctggaggagtgccggcagacagaggccgggccagaagaacggttgcgtattgcactgctgaatgtggattacgtcaccagttttgaactgccttttcgcttgctgcttacccgtacaccgcaattgattgccgcgctgcgtgaagaatggggcatcagccagaaaaatgtggtgtttaacgataaacggtttggctgcgtgtacagcctgaaggccagcctttctggtgtgccggatacataccggtatcatctgtctcaccgtattcgtcgcgtggttgggaatgaaaacacatcattgccatatcagcaggttgcccgggaagtgaaagcgccccgtgaacggctgaagtatgcactggaggcgggtttactggtgactgcactggacggcctgttctggtttggcagtcagcgtattgcggctgatgttctgaggctgagaaaggccggaatgccggtggtgaccacgaccgtggaggtgcacgataacctgacgggaacaacccgcaaagtaccggcataccatctctgatacaaccatcagggggaatattgctctggcagcagcagtatgacattctttatactttatccccgtgcctgaaaacatgtgctaaggaaacgggaatggcaaggtccgattatgatattatcaatctgtctctggaacatgaactgaatgagtggctggcagagagaggttatgccggactggtggataaccggaatcgcctggcagaagttgttacccgcaaattgcaggacagcttttatataaacgtttccagggatgcgctgaacacggcatacagtgaacacccggagtggttttctgggcttgtctccggggatgagaattaataagtggattatgctgctatcaggtagtgtgattgccggcagggatttcgttttattctgtttcttcccggggttcgggtttgaattttcccagaaagttgtacatcggtcgcatgcagggatgcggatagccgtcctgcataaacaccacccgggtttcctcaacactggtcagggtgacaagcgcaccatgatcgtctttgtatcgctgattgactttcggtaatggaacatcttctgacataaattttagtacggtaacagttaactaaattttcatgtggtagcactgaatcaggagactgcgtttcctgatgtgcgctgttaattttctgtttttacgaaacattttccccttcttcctgtgtattttattgcgctcctcctttcatgtccttcccatatcctgaaactcacttaaatgctgttgaatcgtcaaacattgcaactttcaatgactgaaatcaaaaattgctattttttaagctaaccaactgtattaaaagcattcagtggaataattttctgcacttttccagtaattatggttataaattttgtaatgtgctgtttttgcgatatttgtcagaataaagaactgttcatttgtgttatatcgatcgataaatctgtaatgttgctgtagttcagatcattattctataatgatcaaaattaagtcaattctagctggtttgttactcagcattctggtaccggttgatgcgggtaaataccggaagggcggtagcgtgccatcgcaaaacatggtgggaggtatcgtcaggaggctggtgattgttggtatgacatgaataaaaggtttttcgtttgactggaaaattatgttgcaggaacgagaggactgaggaacaaagcttattccggcgctgtccgtccttgctgtcactgacactgatgtctgctttattatcgcctttatctcttcaggcagcggatgtccggcgtagcggagatgaagcatttatcattcagcagcagcgtcaggaagcccttgagcaacaactgacgccttcagcccctgatgttcgcctttctgcacctggctcttttgcccataagattaattttcctgttgaaacgccctgttttcagattaaacagacggaactgaagggggctgatgcgttaccacactggctgcctttacaaaaaatcgccaacggggcggtcgggcattgcctgggggcgaaaggaattaatctgctgatgagtacattgcagaaccgtctggtcgatcatggttatgtcaccacccgtgttctggcaccttcgcaggatttaaaaagcggtatcctccggctggttattattcccggtgttgtgcgacatgtgcgtctgacaccggacagtgatgactatattcagttgtattcctcattcccggcacacgaaggttctctgctggatttacgggacattgagcaggggctggatttaggtaacagccggatacagggacaacatactgagctgaatgcaaccagtggaaatctgtctacacagaatgcgcaactgagtgccgatacgctttccgcccggactgccgggcagttcagcagtaatggcggtacgataaatgccgacacactgcagatatcgacacaaagcctgtcaaatcgtaaaggcagtctgattcagacgggaacaggggatttttcgctgagtctgccgggaagcgtggataaccgggaagggctgcttgcggcaaatggcgcggtgcgtctggatgcactgagccttgataatcgcaaggggaaagtgcaggcggagcagtcaccctcccttcagaaatccccgcccacgtttctgaaaccgtttgtggctggtgtctgtgcggcattgctggcggtcagcgtggctattccgggatggcagtttctgacacagccatcaccggaggagcagcattttacctgggggaatggttgtaaaaagcagtgaaaacagtaaatacagagtatcgtgatgaattagtgctcaggggctaccagtattcaataaccagcgtatcggcatcgcattcctgtaattctggtattgactgttatgactaaattcaatgtatatatggcaggcagaaatatgttaacagtcccggagttgtggaaaatcctccggagctaatatcgggagtgccttaacaattttccgtaagttaaatgataatttctgagtaagaatatggtcacgatttgtgttgacggtgaaaataagactcataaaattaccgactggacgctgtgggctggaaatgacgacagagaggttatgctgacctgtcattttcgcagcgggagaaaatatactcgtccgctttctgtatgtcagataacgccaactgtaaatttgcgaaatgttttcctcgaaaggaaagggaacgctgtaacatcccgggctgaactggttattatatatggtgataaatatgctgctgtttattaccgcgagggtgaacgaccctacatcatgaaaacgaccggccttgactttcaacagtgttcagcatttacagagcatgccgtgtttaattacttgtgtagggtggctaatgaacgtattttttatgcccgtggtaataacagaaatatcgatgagaatatccttaggcagataaagaaaatagttcctcatccggataccgccttgcatgcatactgttcaggacagagtaaaaaacgtgattcgccatggggtttgatttttccgtttggtcttaatgaaagtcagttgctggctgtcgaacgggcattttcctcacagatttcagttattgaaggaccacctggaacaggtaaagcacagactatactcaatattgttgctaatatattaattcagaataaaacagtggcaattttgtccaataataactcagctgtcagtaatgtttatgaaaagatggacaaacagcaactgggatatgtgatggcacgactggggagtacggagaacaggcaacagtttttttcaacgtcgatttcgcgttctgaggaagtcttacctgactcaccgtctgcaaatgcgattgatgatgtacttcaacaagtgaaaaaacacctgaatgccattaaccaggtcgcttcgttaaaagcagaaattaatgagctgaatattgagtataaatacctgcagcaatggcagagtcagaatcttcgaccggaggagcttttttctcacaaataccgattttcctcacaaaaaacaaccgacctgatggcttatattcattacctttctgacaggcggattggattcagaaacagaattgatttgttgttaaacttcatgatactgaaagtcaaaccattgatgattccggagagaaggctggcgctatttacttctcttcagttttcttattatgaaaaaaatatccgggaaaaacaaatttctctgaatgaatatgaggaagtatttaaaaaatctgattttaaaattttactggggcgcctgacatcatggtctatgctttatttaaagcaacatctgcgaagaaatgtttcaacaagaagttcattctcggcagagacatacagggatgaatttgaccgttttataaagcgttttccgattattggtagcagtacgcattcgattattaactctatcggcaagggggcccttcttgattatgttattattgatgaagcctcgcagcaggatattgttccgggcattctgggactgggatgtgcccgtaatgtaatcgttgtaggggatcgtaagcaacttccacatgttcctgtattactcccgaacagcccatctccaccggcagaatactataattgtgagaaatatagtctacttgattcggtttgtatgttgttcaggaacatggtgccagtaacccttcttaaagagcattatcgttgtcatcctaaaatcattcaattttgtaataagcagttttatgataatgctctgataccgttaacggttgattccggtgaagcctcattatctctggtcatcacggcaaaaggaaaccatacccgtaatttttcaaatctcagggagcttgaatctctggaaggtcattactgggatgaagaaagtagcaggggatacattgccccatataatgcacaggttaatctggctgaaaaagtgctgcctgctgattttgtgaaatcgacggtgcataaatttcagggacgggagtgcgatgaaattgtgttttccactgtgctggataagaagcgcagcagccagcacagtcggaacatcgcgtttgttgataatcctgaactggtgaatgtcgctgtttcaagggcccgaaataaatttacgctggtgactggtaatgatgtatttgaacgccacgctggacatattgcggcgctgattcgttacatcaaatactacgctgatgacggagagattttcgagagcccggtcatatcagcatttgatttgctgtacagtgagtatgacaaatcactggaacgactgaatagtagattgaattcaaatgattcacactttaagtcagaacagattgtggcctgcctgttgcgggatatcctgtcgcaggatagttatcggagtatgatgtttcattcacaaatagcgctgaatcagttggtgtcgctggagcggggggattttacacaccgtgaacagttattcatgcgtaaccgggccagttgtgactttgttgtttactataaggtcgggaagactccattaggggttattgaagtggatggaggttatcatctgaccagtgttcaggctgaacgtgatgaacttaaaaacagtatactgaagaaatgcggcctgccattgctaagattacgtactatagacagtgatatagaagggaagttgggagcgtttctgtcaggcctgacaggctaaaatctgaataaaaaatattgcagcgggaggtctcaaacctgatttggtcatgtgccacacacaattgtacgaaccccatggacacaggcttctttgttttggttacatcaacgtacgtattcctgatacatataaaaataagtgctattgctcaaagctaacagggaatgtttctgttgaataattccttagtgaataaactttatcagggggtaattctattacagtgaatacttcctgcaaaatgatatttgaattgttcaccatctgcatcatattttcttatttacaagttgaaaggatagtatatgttgaaaatgcatggattttccaggtgtgttaccagtaagaagcaggtggataaaggatgtgataacaaatccaacaaccaggttaatatctgaagatttttgttgttattatttatccccaaagcggtgagttattaatgaagtttgcctgaatgtataaacagaattattcgacataaagccaggaaaatgagtgatacgcttttaaccgaaaaaatccttaccggagaaaatgttttgcgtgctgcaatcgcccgcattgagtggatttttgaaacatttccgtcggtatgtctgtctttttcaggtggaaaggattccaccgtgcttttccatcttgtggcagaggtggcccgcaggagaaaacgtcatttctctgttctgttcattgactgggaggcccagtatcggtgcaccattgaacatattcagaagatgcgggaaatgtaccatgatgtgacggaaaccttttactgggtggcacttcccctgaccacggtaaacggcgtctcgcagtttcagccggagtggatatgctgggagccaggagtgacctgggttcgccagccaccggaagaggccattacggatatgacatattttccctttttccggtatgccatgacgtttgaagaatttgttccggcattttcttcctggtttgccggtaaccggtgtggagtggcagtgctgaccggtgttcgtgcggatgaatccctcaatcgctttatggggctggtgtctcagcgcaaactgagatatgccgatgataagccctggaccacggcatcgcctgaagggttttattacaccatgtatccgttgtatgactggaaagcccgcgatatctggatatataacgccagagcttgtgccatttacaatcctctgtatgacctgatgtaccgtgccgacgtgccgttacgcaacatgcgtgtctgtgaaccttttggtcctgaacaacgtaaggggctgtggctttaccatgttctggagccggaaacctgggccaggatgtgtgagcgggtgtcaggcgctgccagcggggcgctttatgccaatgaaagcggtgcctattttgccctgcgtaaacgtatatcaaaaccagcccatcatacctggcgcagctatgcgatgttcctgctggatgtgatgccggaaagaacggcagaacattaccgtaataaaattgctgtctacctgcgctggtatcagacgcggggcttcccggatgacatcccggatgaacaggagaatgacctggggagccgggatattccgtcctggcggcgtatctgtaagacacttataaagaatgatttctggtaccggaccctctccttcagtccgaacaaaccccggcactatgaacgttatctgcagcgtatgaaagaaaggaggaaggaatgggggattctgtgacaccggagataattggcaacatgattcgtcagtacttcagccaggaacgaccagaagaagagaccatacaggcccttaatcacctgcgcagagtgcttcatgaagtcagtccttttgcacatgagccagtggactgtgtgctgtgggtaaaagcagatgaggtggtggccaatgattacaatcctaatgtcatggcgccgggtgagaagaaactgctgaagcagtcactggagaaagatggtttcacacaaccggtggtggtgtctgaggaaaagaaccattacctggtggtggatggttttcatcgccaggtgctgggcagggaagcaggtacgggaaaacgtctgaagggctggctgccggtggtctgtattaatccggagagaaagggacaggcctcacgtattgctgcgaccatccgacataaccgggccaggggcaaacatcagataacctcaatgtctgatattgtcagggacctgtcgcgcctgggctggacgaatgaacgcattggtacggagctgggtatggaccaggatgaagttctcagattgaaacagattagcgggctgacggagctgtttcaggaagaggatttcagcccggcatggacggttcgctgagaccgtcagatatgtatattatttcagtgagttaatgttttgagcaggaaaaagagtaccccggaagttgtggaagacatggttgcgcagaaactggaggctgctggttgctggcgcagagcttctgaccgctggctttttgttatgggaaatgttgaatgtacagaagcacaacgggagtggttgttgttgcgccggaattattgtctggcgcagatatcgtccccgccgctacctgaaacgctggatatcagcgaggtggcgaaagctgcagatgccacgctgaggcgaatggggattgccactccgtccggggaggtattcagaaaaggtacaccggtctgttgatattcaggtaacaggtattaatgatgaagcaaggaatggcaaacagtatatcaatgacatggcaacttttatgcgatgaacatggttttacccgggagcactacaatcagctgaagaagttcagcccggagacattacgtgaaattattgctgaaatagccagctgtcatccatcaaccagtgtattgctcaggaataagtggctgacaccgccggaggatattctggagcagattacccgtgaatacgaacgaagaatacaaaactgtccaccgttcaggagcgagaaggaagcggaatcctggttaaatgaactatcttttgctgtgattgctccgctataccgtgttgcccccgaacaaacagaacaggttgagtcctttgttctgcagcttattgccgagcaggagcgggtttgggagcttattttaaccaatgatggttattcatggcattgcgcactttatgatatattatttcatctggttttacgaaatatggaagaccagcctgaacatcagaaacagcgaataacaaaaatattttatgagcccgatgcaagactggttgcagaagagattaaattccggattcaatctctgtatgatgatgaacaaaagagagctttaagtgaactggtaaatgattttacttcaaaagaataaaatgcggcgaggtgatttttactatatgttaataaaacggggggtagatgaaagtgaatggtgttactacatcaaaatatgaaggatggcgagggacgtttcagttatatagatataaaacggtagttctggtgcaccccaaaggatatctggcaggggaaatgattcatcgccaggccctaacgtcgtcttgtcaagattaatgctatagacatagctaaattttttatggataaggatatgaactgtgcctcaggtccggaacatcctgtagggactttttaagtcgggattgagctgaactaatgccaaattatgaacagggaaattcagcagcggctacagtgggtaaaactctatgaaacgtccggtgatgcgggatttgtatgccgtcgctgtggcatttctcggcccacattgcgtaaaatggtggcgcagatatctggctcagggcatcgctggtctggaaagccacagccgtcgccccaagcgttcaccatcaacgaaaaccggcacttgcgaagtcgctctgattctggagttacgttctcagcgaaatctgggggcaagacgtattcaaagcgagttaaaacgacttcattcaatctcactggcaatagcaacaatccacaaagtccttttccagaatcaggtttgaaccgccccgggtttcctggagagtgttttatctgtgaactcaggctgccagatcatcgtttccgatggaagcataataagctttttctgcttctgccggaggagtatggcccagcctttccagcaatcgtcgattgttataccagtccacccacgtgagtgtggccagttccacttctgcacggtttttccagctcttacggtgtattacctccgctttgtaaagaccattgatgctctccgccatcgcgttgtcagtaagcgtaaactgaccgccgtatgtagccatcagacgaaaattggtaacttagacgcccatctgatatagacggacatctaagtatggaattacaggactggcgaaaagaacctcgtaaaaactattcgaatgaattcaaacttcgtatggtggaactggcatcacaaccaggagcctctgttgcccgtattgcccgggaacacgatatcaatgataacctcctgttcaaatggctcaggctctggcagaacgaagggcgtatatcacggcgtcttcaggtaacgacctcttctgacactggcgttgaattattacctgtagaaataacgccggatgagcagaaagaaccggtggcggccattgcgccgtctttatccacttccactcagaccagtgtcagtgccggctcctgcaaggtggagttccgtcacggtaacatgacgctggaaaatccatcgccagagctgctcacgctgttgatccgtgaactgaccgggaggggacgatgatctcactcccgtcaggtacccgcatctggctcgttgccgacgttaccgatatgcgtaaatccttcaacggatacgacatatgctgaaggaggagcagtaatggattaagtgataacaaatacccagaaatagaggttcaaatccagcttagttagtacataaatactattttgatgaaaattattatatgtttcctcagattttaatcaggcgcccagattaaaccaagtattgagcgcctgattatgtttattcattaatatctgtcattgattgtcttattatcagctacccccgtattaatcagagttttcatttatttttaatgcataatcagatgccgcctcatcattatcctcagtattatcatagccgaaaacttctcccggacacgggcgttcacgataatagtcatcgtcatagttttcatcgtcagataatgatatgtcgtattctgaatatgattcaccacaattatacatgaaatcatctcctttggggggggcaataattgtaagcggctcgccagaaccgtattgatatttactgagaggtcagatcaactttccagggcaacagatcgcgtacccggtttgccggccaatcctggatatgctcaatgacgtaacgcagccatttttctggttccacattgttcagacggcatgtgccgatcagcgagtacaacaccgccgcatgttcgccaccgctgtcggaacccgcgaagagccagtttttccggcctacggccactccccgtaaggcgttctctgcgatgttgttgtcgatttccacccagccattactgcagtacacgttcagggcctcccactgtttcagcaggtatgcgaacgcttttgccgtatccgagtgacgcgacagtgttttcatctgttcctgtatccagtcatacagtgactgcatcagtggagccgctctggcttttcttgctgccagacgctgttctgctgaacatccccggacttctgcctcgatgacatacagttcaccgatacgctgcagggcttccgtggtgatgtcggttggcactcttgcatgcacatcgtggatttttctccgggcatgggccatacacgcggcttccgttattctgccggattcgtataacgcccggtaaccaccgtaagcatctgcctgaagcacaccgctgtaaccggccaggtgattctgtggatggatacctttccggtccgggctgtacgcgaaccagaccgccgggggcatctgtgaaccggcgttacggtcatcacggacatagacccacagccgggcagttcttgttttaccactgcccggctcctggaccggaacggggatatcatccgcatggactttaccgggcatcagcacatactggcgcaggacgtcatacagcggctccagcagttcagcaacggcacctgtccagcgccccagcgtggcgcggctcagctccacgccctggcgacggtatatttctgactggcggtataacggcagatggtctgcatatttcccggtaacaacatgggccagaagccccgctccggcataactgcgtgcaatgggttttgaaggcaccggtgcctgcacgatatggtcgcaccggcaacaggccagtttcggacgttgtgtttcgataaccttaaaggcgctgctgataagctccagttgctctgacacatcacatcccagagaactgagttcaccaccacaggcaggacagcattcctcttccggccggataacccgggtttcacggggaagtgaggccggtaacggtttacgggctgaagactggcgcagggcggatggcagtaccgggtcatattgctcacccagcgtttccgccatttcttcctgaagtgcgctgattcgctcctgtgcttcctgtatctgccgttcggtttttgcacgaagtttttctgagcttttaccgaactgcatacgttgcagtttcgcaaccagcgccttcagccggttgatttcggaagcataagccgccacccgctgtgagagcaggcggttgtatttcgccatctggcggatggtgtcctgttgcgtctgcaacagtgcccgcaggcgggcattctcatgagcaagtgaggtgtccatatcctcactttacaacgggttatatgcggatgccagcgcgttccgttcgtttcgggtgcttccagtcgatgccttcgagaagcatggacaactgagccggagtaaggtgaacctttccatcgcgggtgaccggccagacgaagcggccccgctccaggcgtttggtgaagaggcacagtccgtcactgtcagcccacagcacttttatctggtcaccccggcgtccgcggaagatgaacagatgcccggagaacgggtcatccttcaggacgttctgaacttttgaggccaggccgttaaagccatttcgcatatcggtgataccggcaaccagccagatacgcgaaccggcagggagagatatcatcagtggctgctccctttcatttcgcggataagtgtctgtaataacgccggtgtcagttcacctttcagcctgagagttccggccggcagaaccagctcgcagcacagactgtctggcagtgtatttatctgttcaggtatctgcactggtgccgggattttattatccggctccggagttaacgtcacgggaagtagcgatgtttcatgttcgccgggcggttgcaggccaccgttacgccagagatgccgccagttaaagagcaggttatcgttaattccattctctcgagctatttgtgcgacacaggcaccgggtaaaagagtttgctgaaccagtctccatttaaactccggtgaaaatcggttccggcggggtttctctgctttcacaggctgagtcacggtcggggctgaagggtatcgccccgggaaaagagcccgggccagttgcccgcaggaatattcaccggaaagaggccagtcagtgaatacctggtgaaatcgcctcaccagagaaaaaatggcggttttgctgacaccagtctgcgcagaaatgcgcgggtacgacagtgactcgtcaaatctcagctgtagcacacgcaggatcaattctggattatctgccagtaccgcttttcgtgcattcatcttaaatgtccttttactgcgaaaatggacattagtatcggaaacaggaaagggaggcgaaagacggtttaaatgatgcgcttacgtctccactcttccattctcttaagctacgtcggccacatgagtgcacttccatgataacaggtattcctgtcagcataacgaagccggttaccttcccttcctcctgcatttcctgtcagaatgactatacagcgcgcagattgcctttttattgaccatcttaatataccattataaacttctttttatcatgttattatcaccttgttatgtttaatttttaagcagccggagaaagaggatggttcagaaaattttgtcggataaggttatgaatgaaagaacaaatgcgtattactcttattatcttagagagcgtaatatctccgtactgccccttaatgtttatgatcccccggaacgttttatcgcttacataaaaaaaaacagagaaaatctgaacatcacactttcagattttgaacttgaacaaatcatttctggtatgcgtctgaaggcactggcctccctggtgcccctggaaaaaatatcctggatcgcgggcagtgaacgcgcatgcttattttcctggtatctgttgatgcagtttatccagaataacaggacaaaaataagcgcagacttgcttcaaaagaataaactgtatcttaaagaagagtatttagaagggaatgccttcccgtcggactcatcgacacagttcagacaaatactcagagttctcgatattctttctgataagaatttgcgggatgagtggataatccagaccaaagacagatggatacgggcatttaaatcaaagagtcctttcagttacctcctcccggagaacgaacatgaatgcatatggacatggaattatttgaagggaaaaaatattgcactggaaaaactggccagttttcctgattctgctgatatttaccacgcaattcacctttcatttgacatatgggttacctgtccactcacctcacctgacgatataaaaaatttcagaaacagtttcaataaggccaaggcgcagcgcaagtacaaaaaaatgcaggaagataaagtcaatgtacagttttttcttgacgcagaaaccagggcgcagctcaaagaattatcgagggtcagaagactcagtaccggcgaaatgctgcatgacctgattgttgaagagtataaaaggtaccgacattccagataatttcagacatatattatctccgtgagtcccccgccacctttccggtgtgcgggggttttgtcttttttcaccgggaatacatgtatgaatccgtctgatgccattgaggcaattgaaaaaccgctctcctccctgccttactcactttcccgtcacatcctggaacatctgcgcaaactcaccagtcacgaacccgtgattggcattatgggtaaaagcggggccggtaaatcctcactctgtaatgcactgtttcagggggaggtcaccccggtcagtgatgttcacgccggcacccgggaagtgcggcgcttccgtctgagtggccatggtcacagcatggttatcactgacctgcccggggtgggcgagagccgggacagggatgcagagtatgaagccctgtaccgtgacattctgcctgaactggacttggtactgtggctgattaaaagccgatgaccgtgccctgtctgtggatgagtatttctggcgacacatactgcaccggggacatcagcaggtgctgtttgtggtgacgcaggccgacaaaacagagccctgccatgaatgggatatggcaggtattcagccttctcccgcacaggaacagaacattcgcgaaaaaacagatgcggtattccggctgttccggcccgtacatccggttgttgccgtatcggcccgcaccggctgggaactggatacgctggtcagtgcgctcatgacagcgcttcccgaccatgccgccagtcccctgatgacccgcctgcaggacgagctgtgcacggaatctgtccgggggcaggcccgtgaacagtttaccggtgcggtggaccggatatttgacacggtggagagcgtctgtgttgcctctgttgcacgcacagttctgcgtgccgtccgtgacacggtggtctctgttgcccgcgctgtatggaactggattttcttctgaacagtctgccaggggaaatgcctgattacattgcgttaaccaactgaaaacatgatacacccccctcatatccacctctttctcttgcgtgactgccttgctgttaatagaataaaacgatcgataaaacaggtatcgatcgtttccatcgatcgtttatagtggttaatggtctgcgaaaaggcagctgaatctcttcatcatgcataacggaattgcacacaacggactgatacttctctggcggatgagagaggggaagcatttatgtccgggaaaaaccactttatctgaccatgctgttttgtacctgccggtatccacttttgtgggtaccggcttttttattcaccctctgtaaggaaaagctgatgaaacgacatctgaacaccagctacaggctggtatggaatcacattacgggcaccctggtggtggcttccgaactggcccgctcacggggaaaacgcgccggtgtggcggttgcgctgtctcttgctgctgtcacatcagtcccggcactggctgctgacaaggttgtacaggcgggagaaaccgtgaacgatggaacactgacaaatcatgacaaccagattgtcttcggtacggccaacggaatgaccatcagtaccgggctggaactggggccggacagtgaagaaaacaccggtgggcaatggatacagaatggcgggatagccggaaacaccactgtcaccacaaatggtcgtcaggtcgtgctggaggggggaacagccagtgatacggttattcgtgacggcgggggacagagcctgaacggactggcggtgaacaccacactgaataacagaggcgagcagtgggtgcatgagggcggggttgccaccggtacaattatcaaccgcgacggttaccagagcgttaaaagtggcgggctggcaacaggaaccatcatcaacaccggcgcagaaggcggccctgattctgacaactcgtatacgggtcagaaggtccagggaacagcagaatccaccaccatcaacaaaaatggacggcagattatcttattttccgggctagcccgtgacactctcatttacgcaggtggtgaccagtcggtacacggaagggccctgaataccacactgaatggcggttaccagtatgtgcacagggacggacttgcgctgaacacggtaattaacgaggggggctggcaggttgttaaggcaggtggcgctgccggtaacaccaccataaatcagaacggtgaactgagggtacatgccggcggggaagccactgcagtcacccagaacacgggcggtgcactggttaccagtactgctgcaactgtcatcggcacaaaccgtctggggaatttcacggtggaaaacggtaaggctgacggtgttgttctggaatccggcggtcgtctggatgtactggagagccattcagcacagaataccctagtggatgacggcggtaccctggcagtgtctgccggcggtaaggcgacaagtgtcaccataacatccggtggtgccctgattgcagacagtggtgccactgttgaggggaccaatgccagcggtaagttcagtattgatggcacatccggtcaggccagcggcctgctgctggaaaatggcggcagctttacggttaatgccgggggacaggctggcaacaccactgtcggacatcgtggaacactgacgctggctgccgggggaagtctgagtggcagaacacagctcagtaaaggcgccagtatggtactgaatggtgatgtggtcagtaccggcgatattgttaacgcaggggagattcgctttgataatcagacgacaccgaatgccgcgctgagccgtgctgttgcaaaaagtaactccccggtaacgttccataaactgaccaccacgaacctcaccggccagggcggcaccatcaatatgcgtgttcgccttgatggcagcaatgcctctgaccagctggtgattaatggtggtcaggcaaccggcaaaacctggcttgcgtttacaaatgtcggaaacagcaacctcggggtggcaaccaccggacagggtatccgggttgtggatgcacagaatggcgccaccacagaagaaggtgcgtttgccctgagtcgcccgcttcaggccggcgcctttaactacaccctgaaccgtgacagcgatgaagactggtacctgcgcagtgaaaatgcttatcgtgctgaagtccccctgtatacatccatgttgacacaggcaatggactatgaccggattctggcaggctcccgcagccatcagaccggtgtaaacggtgaaaataacagcgtccgtctcagcattcagggcggtcatctcggtcacgataacaacggcggtattgcccgtggagccacgccggaaagcagcggcagctatggcttcgtccgtctggagggtgacctgctcagaacagaggttgccggtatgtctctgacgacaggggtgtatggtgctgcaggccattcttccgttgatgttaaggatgatgacggttcccgcgccggcacggtccgggatgatgccggcagtctgggcggatacctgaatctggtacacacatcctccggcctgtgggctgacattgtggcccagggaacccgtcacagcatgaaagcgtcatcggacaataacgacttccgcgcccggggctggggctggctgggctcactggaaaccggtctgcccttcagtatcactgacaatctgatgctggagccacaactgcagtacacctggcagggactctccctggatgacggccaggataacgccggttatgtgaagttcgggcatggcagtgcacaacatgtgcgtgccggtttccgtctgggcagccacaacgatatgacctttggtgaaggcacctcatcccgtgacaccctgcgcgacagtgcaaaacacagtgtgagtgaactgccggtgaactggtgggtacagccttctgttatccgcaccttcagctcccggggtgacatgagcatggggacagccgcagccggcagtaacatgacgttctcaccgtcccggaatggcacgtcactggacctgcaggccggactggaagcccgtatccgggaaaatatcaccctgggcgttcaggccggttatgcccacagcgtcagcggcagcagcgctgaaggctataacggtcaggctacgctgaatatgactttctgattatacggtatcccggaaatacgatttcaggaaaattcatgcagtaatgggaaaggacgctcattgctgttcaccgcagttctgaattattgaatttataaaggtgaatgatgcacgaaaagaacatcgccctgctttgtgatgaagccgaccggcttttgcaactgaatatcaatctgctccggcaaatggttgatgagccggatgtgttatctgacagtaagaacgaaaacgggctgctttttgataaacggaaagcgctgaaaagaattgaggagctggagggcgaacaaatcaaaaccgcccgcagggagatggtgctggctgtggtcggcacgatgaaggcgggcaaatcaaccaccatcaacgccattgtggggcaggaaattctgcccaaccgtaaccgccccatgacctcggtaccgacattgatccgccacgttcccggaaaaacggaaccggtcctccatctggaacatattcagcccgtccgcaatttattaatcacactgcaggaaaaactcgccaccccggcagggcagcaagtcgcacagtccctgcagcaaaccggggatacccgcgaactactggatattctggcggatgatgtctggcttaaaaatgaataccacggggaagacgaaatctttaccggactggcatcgttaaatgacctggttcgtcttgctgcggcaatggggactgaatttccttttgacgaatacgcagaagtgcagaaactaccggtgatcgacgtggcgttcagccacctggtgggaatggatgcatgtcagggaacactcacactgctggatacccccggccctaatgaagccggacaaccacagatggaaatgatgatgcgggatcaactacagaaagcctctgcggtgctggcggtgatggattacacccagatgaactcgaaagccgatgaggaggttcgtaaagagcttaatgccattgctgacgtctcagccggtcgtctgtttgtgctggtcaataaattcgatgaaaaagatcgcaatggtgatggtgcggatgccgtacgccagaaggtgccagcaatgctgaacagcgatgtgctgcccgcctcccgcgtttatcccggctcatcacgtcaggcgtacctggctaaccgtgcgcttcatgagttacgaaaaaacggtgcgcttccggttgatgaagcctgggtcgatgattttatcagggaagctttcggacctatggtggaagaggacgactggaaagacagcactaaggtaaataaaaaggcagaaaaactctggaatatatctctgatcgatcaactgataacggaagtcatacagagctcccattccagagcggcggcactggcggttgactctgccgccgcaaaactgatgcagaatgcagaaaatgtcagcgaatatctgtcattacgtcatcaggggctgcagcaaagcattcagtcactacaggcgcatattaccagcctgctggcggatatccaggagattgaggaatgtcagaatcaggtgaccggtgatgtcagaatggccatggaggacatcaataccaaaaccggggaattactgacgaaggtctgtgcctcactggaggaggagctgaacgactatttcagaagcggtaaacgcaaagaacagcaaatgctggaggaagaaaattcagcgcagccccgggagagaaacgcattcgctttctttcacgatattttcggaaccggaaatcagcatgacaggatgcgggactttgatccggacagccccgaaataaaattcagtgatcgcagggcagcccttgaactgatgacgcaaatcgaatcgaccgtgaccagcctgcaccgtgaggctgaagcacagttccggcctgagctggagaaaatcgtcagcgggattgaaacaggttttcgtggcacggccctgtacgccacagaaaacattgccggtcgcatcaatgcccgcctggaggatgagggctttaccgtaaaaatcagttttccggcagtcagccagttacagacccggctcgcggtaaaaataaatctgagtgcgcttatggaggaaagaacggagaccgtcacccgtcgccgtcggcagagtggcgtatggggaaccgtttgtcgatggtttggcaccagtgacctgggctgggaaaactatgacgaggatgtgagtcgcagcgtgatcaatatcaacaaggccagagaggaagttatgtcactgacccgggcatatttcggggagctgcaggcatccattgagcaggatattaaccagcccgtccgccaggaaatcgatgcctttttctgcgcattcagggagaaagttgaacaactgcgtaacacgctgattcagagctctgaagatcataaacgcgatcagcaggcgcaggaacggcttaccgggcgacttcaggcattaaatgaaagggttcctgagctcattactgacagtaaggcgctgagggaagagctggagacaatgctgtgacttcaccatttattcaacaaattgctgataaccgggtatgtcaggtactcacctgtcttcctgaaaaatttgtggttgatttcgcaaacggaatcgatgttgcacaggagcatatccgcacggccggagagcgcacgttcttccggcgtttaaaagaggggctgaccggcgaaggcgctgcacggcagaatgccatcaatgcgtcgcttgcacagggcgttgaggcgtccctgcgctggctgacggagctgacaacgtcacttgccaccacaaactacgcgattacccgggtaaacgacagggtcagttcactggtcagtgatactgccaggctggcgcattattcggctgacacgcgggagcagttactcactctggcagaacaggttcatcagaaactgaatcatcttgaggaaaaactccaccgtgttgaccaggttcagcgggcacagttacatcttgagcagatattctcgtggtggagcgccgggcgatacgcgtcattttcccctgccggacgttgttatgtggcgcttgaagagcttcgctggggcgcgtttggtgatgtgattcgtcagggtgaaacaggccaggttaatcagttactggatattctcagatataaagcattaacgcagatggcacgggagagtggcggtagcgcaacagtacgtctgaacacactggactggcttggtggtcagcgccgggaacaggctgataacgaatggcatgaagcggttaactggctgggggactggtgcagtgaagagcggcatcctgtgatctggtcaaccacgcaggctgcagaacacttaccggttcgtatgccccgtctctgctctgcagaacgcctctctgaaagtatggttgatgaaatatttcagaagggagaggcatgagtacagaaatgcaaacggggctggtgctgtccggcggcggagcggtgggcgcttatcaggcgggggtggttaaggcactggcagagtgcggcgcacagatcagtatggtctcaggagccagtatcggggctctcaatggtgccattatcgcggcctctcccgatctgtcagaagccaccttacgcctggaggcgctctgggatcatctggggaataatcaggttctgtcggtaaacagatcggtttacttttcattgctgaaaaaactggttcaggccatgaacctctgccagatccccggacgtgcgggcgcactgcttacgacgctttttcgccatatatcgacaatcaacgggttcgacaatccgatgattcagccgctgttgtcagatgagcccctgacagcgctgatggatcattatcttgatacagatgctctggctgacgggctaccgctgtacgtgtcgctgtaccccacagaaggaggcatgcaggatattattgactgcattcgtgctgaactgggtgccggaaccacgaaaaacgccgtttttcagcatatccagagtctgccccgcgggcagcagaaagaagctttactggcgtcagccgcgctgcctctgctgttccgtccccgcgaggttcagggaacaatgtacggtgatggtgggatgggcggatggcgaaacaggcaggggaatactcccgtgacgccactggtggatgccggatgcaatatggtgattgtgacgcatctgagtgacggttctttatgggatcgtcgggcttttccggacaccacaatccttgaaatccgtccccggaaaaggctgaaacatgcaggtgatggtggcaacagtggcggtctgctcagtttcacgtcggcacatatcgacgcctggcgtcagcagggctacgaggacacgatgctgacgatggagcatatccggaaaccactggcggcgcgtcaggcactgacccggtcagaggcggtattacagaaaagccaggagataactgaaggtgcagattcggcactgagaaacgcgatggcccggattaaataaagacacaccggagaaacgccaccgccactgtggtggtgtttttcttatctggtgttattgaaaatattttcagatatatattacccggatgatggttaagattaatttatttaattttggggagaaatctcatgaaactgttaaacattcttttagctgttgttttaactgtaagtacaaccgtagcacaagcagaatcggcattgtagaagcgtaacagtgttgctggcaccgatatgttcagtgtcggtagtgtttctattaactgcacgattaatccagaagacaacaatttgctaccacatatgagtggatttacggtcatacccccaccccgctaaatcagtacgattctgatattatttttatcatcaacggtaaaaagtattcggccccacctgtcgacggaacacgaatgaataagaatgcgtgggtatactttatcgatgctatcggtgaagccacgaagctcgacgttttagtaaacggtaagaaagtcgacagctataccgcaaatatcaaaaatgagaaaaagactttgggtaacaaattctacggtagctgctggaacacctggttccaggaataattgataacgtggtgtaaaacacctcagtttaatttaatacagtgagtgaaaatgaatatcataaaaatatttttgttttggatgtcacatgttttattaactgaatgattaacaggagaatcagatgaactggcattatgaaaaaaatggtgtacgttatgataacgtaacagaggaagatattatcgaacgtatccggcgtggtgaactgaatgcatcaacactggtgtggcaacagggcatgctggaatggcagccagtttcagccacatcactggcggaaatactgaaacaaagtgaagttcctccggcccttccgggtcaccgcattcccggagacgttgtctggacgctggcatttgcccctttgattgggtacatacttgagatgtggactgccgggctgaacggtatgtcatttgaacgggcttatgatgcagtcagcgaaggccagtactggtttatctctctgattctgaatattgctctgggatatctggatgaacgaaaactccgtaaatctggtgttgataccacagcatttggctggctggcatggctgatcccggtttatctgtggcgtcgggcaaagatcctcgggcaaaaacctgcttatttctgggtctggctggttatgctgatactggtgttatttacgatctgatattctttctcgcagagtttgctaaataatcaggttattagtgttcttaacaggtaaatgatgttcatcatggaacggatatattttatttgattcaggagacagtcagaaacatagtataaatatatcaccatgttgaaggtcatatcttcaggtatgtgtttaataaacaagtcgggggttaatcctgacctctcgagtggattataagtattgcagaaacagtttttatacttttatttaacatcagaaacaatggagtatttatcatgaaaaatatcatcactattttaatgattgcagttatcagtttctttactgctaatgtatcagcaaacaatgccgttcctttaccgaccaacctgactgacgttactgacggtacagaattctggtgtcagggtactgatactatcgacggaggttgtgaatacctgggcacatccaaagacatgcaatacggtctggtacacgccatggggggtacagcgtgctgggatggtttatacggcgtaattaatttctataccggtaaagcccagaccatcaaatacaacaacaatcaaagttgtgaaggcaacatcaccgccggtttcgttaccctaaaaaacggtaaaccgggcgttaaactttacgacaatacgattcataagattgtcgggcttgacgaaatcaaaatttaatgtatgaattatagtatcttatctgcgcgttattaatatcaaatgtaaataaatcctctgccataatggcaggggctttatttttacctgaaaatacatgacgggctgtacattacttttattttccgaagatcctttctcacgcaaacagacagttgctgtcataacagcttaccgcaatgtgtttatccaggaatgcatttccggcggattatccgcaacgcggaaggtcagcgacgctggcgctgccggaattctgaaccctatgcaggcaaacaacttaatgcgtggctcaccagtgaagggcttcccggacaataaacctcattcatttcacccatcaggccgcgtcttctccgggagacgcggttttttcatttataccgcttaatcattcataaggagcaattatgcgattagccagtcgttttggttatacaaaccagatacgccgtgaacgtccactgacacatgaagagctgatgcactatgttcccagtatttttggagaagaccggcatacctcccgcagtgaacgctatgcgtacattcccaccatcaccgtactggaaagtctgcagcgggaaggctttcagccattcttcgcctgccagacacgtgtgcgtgacccgggtcgccgggaatacacaaaacacatgctgcgtctgcggcgtgacggggagataaccggacaacatgtccctgaaattattctgctcaactcccatgacggtacctccagctaccagatgctgccgggttacttcagattcgtctgccagaacggctgcgtctgtggtcagtctctgggggaagtgcgtgttccgcaccggggaaacgtggtggagaaagttattgaaggggcttacgaagtggtgggcgtgtttgaccggattgaggagaaacgtgatgccatgcagtcgctggtcctgccgccaccggcacgccaggcactggcgcaggcggcactgacttaccgttatggtgacgaacatcagcccgtcaccactgctgacattctgacaccacgacgcagggaggattacggcaaggacctgtggagcgcatatcagaccatccaggagaatatgctgaaaggcggaatttccggtcgcagtgccagaggaaaacgtatccacacccgggccattcacagcatcgacaccgacattaagctcaatcgcgcattgtgggtgatggcagaaacgctgctggagagcatgcgctgatgccttttccctgaaagcgcagtcctgactcacttccgtccctgcctccggacattcttccattcatttactttttataaggaataatctcatgacaaccgttacgcataattccaccacaccttctgtttccgtaaccgctgcatcagggaataacccacctcagctggttgctactctcgtccctgatgaacagcgcatcagcttctggccgcaacattttggccttattccacagtgggtgaccctggagccccgtgtcttcggctggatggaccgtctgtgtgaagactactgcggtggtatctggaatctgtacaccctgaacaacggcggggcatttatggcccccgaaccggatgacgatgatgacgaaacatgggtactgttcaatgtcatgaacggtaaccgcgctgaaatgagcccggaagccgccggcattgctgcctgtctgatgacgtacagtcatcatgcctgtcgtacggagtgttatgccatgacggtccattattaccggctgcgggattatgccctgcagcatccggaatgcagcgccattatgcgcatcatcgactgaatggagagaagcacaatgcaacagctttcctttctgcccggagagatgacgcccggtgagcgcagcctcattcagcgggccctgaaaaccctggaccgccatcttcatgaacccggtgtggccttcacctccacgcatgcggcacgggaatggctgattctgaacatggcaggactggagcgggaagagttccgggtactgtatctgaacaaccagaatcagttgattgccggtgaaaccctcttcaccggcaccatcaaccgcacggaagtccatccccgggaagtgattaaacgcgccctgtatcacaatgccgctgctgtggtactggcacacaatcacccgtccggtgaagtcacacccagcaaggcagaccgccttatcacggaacgtctggtacaggcactgggcctggtggatatccgggtgccggaccatctgatagtcggtggcagccaggtattctcctttgccgaacacggtctgctttaacccgtcaccgtcacaaccacatcacacctgttttcacttttatcttctgtcttcagaggtatcccattatgaaaattatcacccgtggtgaagccatgcgcattcaccgtcagcatccggcatcccgtctttttccgttctgcaccggtaagtaccgctggcacggcagtgctgaggcgtataccggtcgtgaagtgcaggatattcccggtgtgctggctgtgtttgcagaacgccgtaaggacagttttggcccgtatgtccggctgatgagcgtcaccctgaactgaatcagaaaggggattctgatgagcagcattatcaccaccactgtgtatacgctggatgaactttcctgccctgctgcacgggaaaaagcccgcgactggtaccgtcagtatcatgctaacagcaactggtatgaaaacgtgtatgaagacttcagggaggtctgtaacattttcgggattagcctccgccagcgcgttttccggctcagcaacggcaggtttatggaagagccgtgcatctggttcagcggattctgcagccagggggacggagcctgttttgaagggcgctggcactggcagccagcggcaccccggaaaatcagggaatatgccccgcaggaccgtgagcttcatcgtatcacggatgccctgcaggcggtgcagaaacgtaacttctggcagttgcaggctgaaatcagtcacaggggacgttactgccatccgtacagcatggatatcaccgtcacccggaacagtccgactggtcaggctatgacaaccgatgcggaagccgcagtcagcgaagccctgcgcgacctggccttctggttgtaccgtcaactggaaaacgagtacgactggctgacctcagacgccgctgtggatgaggcccttctcatcaacgaatacaccttcaccgaagccggtctgcgcgccggctgactcgtcatcgttaaactatcattcaccgattttctgtaaggattttatcgtgtcagactcactccatgaaacaaattatcccgacgataacaacgaccgcccctggtgggggctaccctgcaccgtgacgccctgttttggggcacgtctggtgcaggagggtaaccggttgcattaccttgccgaccgtgccggtatcagaggccggttcagcgacgcggatgcgtaccacctggaccaggcccttccgctgctgatgaaacaactggagctcatgctcaccagcggtgaactgaatccccgccatcagcataccgtcacgctgtatgccagagggctgacctgcaaagccgataccctcagcagttgtggttacgtttatctggctgtttatccgacgcccaaaatgaaaaattaactctccagaatagccttctgctacggcctggtgttttcaccacgccactttcccatttttatatctgcatatcaggaaaatcttcagtatgaaaacattacctgtattacccgggcaggcggccagttctcgcccgtctcctgttgaaatctggcagatactgctgtcccgactgctggaccagcactacggcctcacactgaatgacacaccgtttgccgatgaacgtgtgattgagcagcatattgaagctggcatttcactgtgtgatgcggtgaactttctcgtggaaaaatacgcactggtgcgtaccgaccagccgggattcagcgcctgtacccactctcagttaataaacagcatcgatatcctccgggcccgccgggcgacaggcctgatgacccgcgacaattacagaacggtaaataacattaccttgggtaaacatccgggggcgaaacaatgaaactggccctgacgctggaagccgacagcattaacgtgcaggcactgaacatggggcgaattgtcgctgacgtcgatggtgttaatctcactgaactgattaacaaggtcgctgaaaacggttattcactccgcgtggtggaggaatccgaccaacagtcaacctgcacactaccaccgtttgcaacccttgccggcatacgctgcagtaccgcacatatcacggaaaaggataacgcctggctgtactcgctgtcacaccagaccagtgacttcggtgaatcagaatggattcatttcacaggtagcggatatctgttacgtaccgatgcgtggtcatatccggttctgcggctcaagcgcctggggctgtcaaaaacgttccgtcgtctggttgtcacactcatccaacgttatggcgtcagtctcattcatctggatgccagcgctgaatgtctgccggacctgcccactttcgactggtaaccaggaacaacatgaaatcattaaccacggaaaccgcactggatattctgattgcgtggctacaggacaatatcgactgcgaatcgggaattatctttgacaacgatgaggataaaacggattcggcagcactgctgccctgcattgaacaggccagggaggatatccgtaccctgcgccagttgcagtttctgcaacagaaccagtgagtcttactcaccagacttcattccactgacgccagcctgaacagggctggcgttttcatttatctgcaaaaaggaatatcgattatgtctgatatcacagcctcccgtccggaagtggtcaacgggcatacggacgttatctgctcaaccagtatccgccacattctgactgtacgaaagagtacgctgctgcaaatcgacacacttatccggcaactggctgaaatctcagcaatgacagaaagtattggcggtaaaaccgcactggactgggcgatgaaacaggattttcgctgtggctgctggctgatggaaaaaccggaagcagcaatgaaagccatcacccgcaatctcgatcgagaaatctggcgtgacctgatgcaacgttccgggatgctgtcattaatggatgcgcaggcccgtgatacatggtaccggtcactggagtacgataattttccggaaatcagcgaagcgaacatcctgagcacatttgaacaactgcaccagaataaggatgaggtgtttgagcgaggggtgatcaacgtcttcagagggttgagctggaattacaaaaccaactccccctgtaaatttggtaataaaattatcgtcaacaatctggtgagatgggaccggtggggatttcatctgaacagcgggcaacaggcagatcgacttgccgacctggaaagaatgctgcacctgttcagcggcaaaccaatccccgacaaccggggaaacatcacccttcgtctggatgatcacattcagtctgttcagggtaaagagagctatgaagatgagatgttcagcatcagatactttaagaagggctccgcacacatcacgttcaggaaaccagaactggttgacagactgaatgatattatcgcaaaacactatcctgacatgctggcagtatagctttgccagtatgctcaaagatcggaaattgtccgataagatatgatcgcggggcatataaaccggtttcagatggcatacccgatggcatactgtccggaaggataaataaaaaagcgcatgttaaacaataacatgcgcttataatctggcggtgagggggggattcgaacccccgatacgttgccgtatacacactttccaggcgtgctccttcagccactcggacacctcaccaaattgtcgttcctgtcttgctggaacgggcgctaatttagggaaatcatgacctgaggtcaacaaacttttttaaaaaatcgcgcgtttattcaaacttcaatcaatatgcagttttaataagcgaaatctgctttttttgccaccgaccacggatttgttatgctggtggcttttgtagatcataacgataagtgcgaataaatttcgcacaacgcttttcgggagtcagtatggatatcatcttttatcacccaacgttcgatacccaatggtggattgaggcactgcgcaaagctattcctcaggcaagagtcagagcatggaaaagcggagataatgactctgctgattatgctttagtctggcatcctcctgttgaaatgctggcagggcgcgatcttaaagcggtgttcgcactcggggccggtgttgattctattttgagcaagctacaggcacaccctgaaatgctgaacccttctgttccactttttcgcctggaagataccggtatgggcgagcaaatgcaggaatatgctgtcagtcaggtgctgcattggtttcgacgttttgacgattatcgcatccagcaaaatagttcgcattggcaaccgctgcctgaatatcatcgggaagattttaccatcggcattttgggcgcaggcgtactgggcagtaaagttgctcagagtctgcaaacctggcgctttccgctgcgttgctggagtcgaacccgtaaatcgtggcctggcgtgcaaagctttgccggacgggaagaactgtctgcatttctgagccaatgtcgggtattgattaatttgttaccgaatacccctgaaaccgtcggcattattaatcaacaattactcgaaaaattaccggatggcgcgtatctcctcaacctggcgcgtggtgttcatgttgtggaagatgacctgctcgcggcgctggatagcgggaaagttaaaggcgcaatgctggatgtttttaatcgtgaacccttaccgcctgaaagtccgctctggcaacatccacgcgtgacgataacaccacatgtcgccgcgattacccgtcccgctgaagctgtggagtacatttctcgcactattgcccagctcgaaaaaggggagaaggtctgcgggcaagtcgaccgcgcacgcggctactaataaagcatcaggattcctgctatccttggcgggaattgaatacaggagagagttatgtatcccgtcgaccttcatatgcataccgttgccagcacacatgcatatagcacattgagtgattacattgcccaggccaaacaaaagggcattaaactttttgcgatcaccgatcatggcccggatatggaagatgctccgcatcactggcacttcattaacatgcgtatctggccgcgagtggttgatggggtagggatcctgcgcggcatcgaagctaacattaaaaatgttgatggtgaaattgattgcagcggtaaaatgtttgactcgctggatctgattattgccggttttcatgagccggtttttgcaccacatgacaaagcgaccaatacacaagcgatgatcgccactatcgccagcggcaatgtgcatataataagccatcccggaaatcccaaatatgaaatagatgtgaaagccgttgctgaagcagccgcgaaacatcaggtggcgctggaaatcaataattcttcatttttacactcacgtaagggcagtgaagacaactgtcgtgcggtagccgcagcggtacgtgatgctggaggttgggtggcattaggctcggattctcacaccgcgtttaccatgggggaatttgaagagtgtcttaaaatcctcgacgcggtagattttccgccagagcgcattttgaatgtttctccgcgccgcttactgaacttccttgaatctcgcggtatggcaccgattgcggaatttgcagacctttaattactagtaatggaaatatattaatgaacgagttttctatcctctgtcgtgtgctgggttcgctctattaccgccaaccgcaagatcctttactggtgccgctgtttaccctgattcgtgaggggaaactggctgcgaactggccactggagcaggatgagttactgacgcgtttacagaaaagctgtgatatggcgcaagtctctgccgattacaatgcgttgtttatcggcgatgaatgtgccgtgccgccatatcgtagcgcatgggttgaggacgcaacggaagcggaagtgcgcgcttttctttccgaacgagggatgccactggcggatacgccagccgatcacatcggcacattgctgcttgcggcttcctggctggaagatcagtcaacggaagatgagagcgaagcactggaaacactgttcagtgagtatctgttaccctggtgtggtgcgttccttggcaaagtggaggcccatgcaaccacgcctttctggcgcaccatggcaccgctaacccgcgatgccattagtgcaatgtgggacgagctggaagaagattctgaagaataagtgtgatctacatcactcataactgcaacggataatttgttgttgcataaaatgtgtgctcgatctcattcatggccgcgttttctgctatcatgcgcggcatgaacatacttctctctattgcaatcacaacaggcattctctccggtatctggggatgggtggctgtttccctgggcttactaagctgggcgggcttcctgggctgtacggcctactttgcctgcccgcaaggtgggctgaaagggctggcgatctccgctgcaaccctgcttagtggcgtggtgtgggcgatggtcattatttacggtagtgcactggcaccacatctggaaattctcggttatgtcataaccggtattgtcgcgtttctgatgtgtattcaggccaaacagctgctgctttcatttgttccggggacgtttataggcgcatgcgcgacgtttgccgggcagggtgactggaaactggtgttaccttcgctggcgcttgggctgatatttggttacgcaatgaaaaacagtggcctgtggctggcggcgcgtagtgcaaagacggcgcaccgtgagcaggaaatcaaaaataaagcgtgaggggcactcacgctttcgcttaaacagtaaaatgccggatgataattccggcttttttatctgtcaggattccggtggaaccgacatatggcggtatttcaccagaatgtcattctgccgttctgctttattttgcaaatcccacagaccacggtcgataccatcattaatcaggaaaatgacccctgtttcgatagccgacatcaggcacagcataacaggttcgttcgaggtgtaacccacttccccttcaagcaagcgctggtagtcaataaagcggaaaaccccggcctgaacttcataggaaagtatcgtcttactggtgttcaccgaagaaaggatctcgccggtactcacattgacgacgcgcaggttcacggcaatctgatcgagctggtattgcgtgtcggcaccgatgccaaaatatcttgccccaaccccgccagatttgacgttgctttcataaccgataatcgaaccttcaaccatgatatttgccgccgttaaagattgcagcgggattcggttattaatggcaaccgtgccgttttcttgtgccgcacgaataatcttgcgctcgttaagcaggttttgtaagccctggcgctccagcggtataaaccagcgagaatctttcagtgccgtgaccagcattgccgtggcgctttgcggaacagcagtggagaagttacttgccgggtagggtttaaattgcccggtttcgtcctgaatgttgtataccgaaacaaagattttacccgtcggcgctggcagatgggtcaaatctttgtagctctgagcacgaggcattaatgtcggtctggcggcttctttaggcggggcggttaagcatccgctcagtaacatgacggcaaccaaaagaaataagcgctgcatgattattttccttatgaagctggggcttaaaaatcggttgagttattttgtaaacccgaaacctggatggtcgaggtttgtccggttttacgatctgtcacgttcaactgcaattgaccatcgcggttggcaatatcgacaatataatcgttggtcaccatgcggcccggtttaccggtattaatattcgacagtagcccacctaaaatttgtgactggatggcctgagtaaagttatctaacgctgagggtgtttcaataccaaagtcatcgttatagctcggatctttataagagttttgggcctgagcgctatttaataaaaaagcgccattatttgggttaccaccaaagtttggattacggaactggaaagtcatggttccagcccaacttaatggcgaaataagcatgagtagaactactgcatgtttgacacgcattgcagcctccgaacaattttttatttagaattcatcatgcgccaaatcgcccgtacttaataacgcctgatttatctggcgacgatttagtgcttcttcagtttgaatcagtgcaaagacgaccgttttctcgaagtctcttttcaacggaaataaaaaagtctggaaaataacgtcctgattgaccgttatagtgatccagcttccccatcgtgcactgggcctttcattaatcgttaagttacccgtatagtcactttcccatttatcactaaaggctcggtaaaaatcatggccaatagatgaaacagtatggtcagttagcaatcccgggacttctacctcaacggcgtgaagattccctgcggcgaacagaaattctgccgccacaatccagcgtaaataacgtttcatggctttatcgcctgaggttatcgtttgcccaggaaaccgcttgtgtccggttttttacggctatcttcttgaaaagattataaagatgcgttttaaccgtattttcgctgatgaacaacgaacgagcgatctcgttattagacgcgccgatacgcagcttattcaggatctctttttcccgatgagtaaggagggctgattccgtgctgttataacgatagttacctgaatgcgtaatcaggtagctggcaagcttttgcgtaaagtagcattcgccgcgcaggacgccttgcaacccattgacaacacgttcttgatcctccatggaataaaaaacgccgttgatatgaggccagttttcaatgtcgcggtacgggtaatcttcaggcgtatttagcaacaatattttgatattgttgtttttcctgctcaaagtatcctgccaataatggataagctttttatccgcttccatcatatccagaagaataatagagcctgaagagatatcgtccagagaacgttgaatattatgtaattttcctgtaattgccagcgattgtttaaggtgctgcaagagagctgtcgcctgcaaagaaggtttagtgatcaacaataatgtatgaccatgaatactatggacttcattaaacatgatgaaaccccgctttttttattgatcgcacacctgacagctgcctctaaaatagaagcaccagaagtactgacagatgttgcactgctgtgtgtagtaataaatcagccctaaatgggtaaaatataaaactaatggattacatctgatttcaatctagccattacaaatcttaaatcaagtgttaaacatgtaactaaatgtaactcgttatattaaaatgttaaccttaaggttttattaagtttagaaatgatagaaaagttgtacatttggtttttattgcacaattttaaaaaatcatacaaatggtgataacttactaataatgcatataaaaaatatttcggtgtagtcctttcgtcatgtaaaacgttcttgttttttctccacacctccgtggacaattttttactgcaaaaagacgaggtttgtcacggcttgtgcgcaagacatatcgcagcaatcagcgacgggcaagaagaatgactgtctggtgctttttgatagcggaaaacggagatttaaaagaaaacaaaatatttttttgcgtagataacagcgtattttcgtgggttttaatactttggtatgaactaaaaaagaaaaatacaacgcgcgggtgagttattaaaaatatttccgcagacatactttccatcgtaacgcagcgttaacaaaatacaggttgcgttaacaaccaagttgaaatgatttaatttcttaaatgtacgaccaggtccagggtgacaacatgaaaaacaaattgttatttatgatgttaacaatactgggtgcgcctgggattgcagccgcagcaggttatgatttagctaattcagaatataacttcgcggtaaatgaattgagtaagtcttcatttaatcaggcagccataattggtcaagctgggactaataatagtgctcagttacggcagggaggctcaaaacttttggcggttgttgcgcaagaaggtagtagcaaccgggcaaagattgaccagacaggagattataaccttgcatatattgatcaggcgggcagtgccaacgatgccagtatttcgcaaggtgcttatggtaatactgcgatgattatccagaaaggttctggtaataaagcaaatattacacagtatggtactcaaaaaacggcaattgtagtgcagagacagtcgcaaatggctattcgcgtgacacaacgttaatttccattcgacttttaaatcaatccgatgggggttttacatgaaacttttaaaagtagcagcaattgcagcaatcgtattctccggtagcgctctggcaggtgttgttcctcagtacggcggcggcggtaaccacggtggtggcggtaataatagcggcccaaattctgagctgaacatttaccagtacggtggcggtaactctgcacttgctctgcaaactgatgcccgtaactctgacttgactattacccagcatggcggcggtaatggtgcagatgttggtcagggctcagatgacagctcaatcgatctgacccaacgtggcttcggtaacagcgctactcttgatcagtggaacggcaaaaattctgaaatgacggttaaacagttcggtggtggcaacggtgctgcagttgaccagactgcatctaactcctccgtcaacgtgactcaggttggctttggtaacaacgcgaccgctcatcagtactaatacatcatttgtattacagaaacagggcgcaagccctgttttttttcgggagaagaatatgaatacgttattactccttgcggcactttccagtcagataacctttaatacgacccagcaaggggatgtgtataccattattcctgaagtcactcttactcaatcttgtctgtgcagagtacaaatattgtccctgcgcgaaggcagttcagggcaaagtcagacgaagcaagaaaagaccctttcattgcctgctaatcaacccattgctttgacgaagttgagtttaaatatttccccggacgatcgggtgaaaatagttgttactgtttctgatggacagtcacttcatttatcacaacaatggccgccctcttcagaaaagtcttaatttgttgaaatatcgagcataagatgaatctggagagaatggtctgctgcgaatcagccaacctgaaagtatggataacacaaccctcaaggatgactaatcattgaggaaatagaataaatgttcagaccttttttaaactctcttatgctcggcagtttgttttttccttttattgccattgctggaagcaccgtgcaagggggcgtgatccatttttatggccaaattgtggaaccggcatgtgacgtcagcacccagtcatcacccgtagaaatgaactgcccacagaatggttctattccgggcaaaacctactccagcaaagcgttaatgagcggcaatgtcaaaaacgcgcaaatagcctcagtaaaagtgcagtatcttgataaacagaaaaagctggctgtaatgaacatcgaatataactaagtttctgaacaactcacgttgctgagcagaaaaatgcgatttaaccaaaaagcctgctgtacacttaagaaacaagaaggtgtaaggaggcgttatgaaaacgcgtattcatgttgtgcagggtgatattaccaaactggccgttgatgtgattgtgaatgcggctaatccgtcattaatgggaggcggcggcgtcgatggggccattcatcgcgcagcgggtccggccctgctggatgcttgtttaaaagtcaggcaacagcagggcgattgccctacggggcatgccgttattacgcttgcaggcgatcttcctgctaaagccgtagtgcacaccgtcgggccagtctggcgtggtggtgaacaaaatgaagaccagcttttgcaggatgcctatctcaatagcctacgactggtggcggcaaacagctttacgtcagtggcttttcctgcaatcagtactggggtttatggttaccctcgtgcggcagcggctgaaatcgcagtaaaaaccgtttcagaatttattacccgtcacgctttacccgaacaggtatactttgtctgttatgatgaagaaaacgcccacctctacgaaagactccttactcaacaaggagatgaatgatttgccccggctggcgagcgcggtgctgccactgtgttcgcaacatcccggtcagtgtggcctttttcctctggagaaaagtctggatgcgtttgcagcccggtatcgtctggccgaaatggcagagcatacgctggatgttcagtattacatctggcaggacgatatgtcgggtcggttactgttttccgccctgttagccgcagcaaagcgtggcgttcgcgtccgtttgttgctggacgacaacaatacgcccggacttgacgatattttacgcttgcttgacagccatccccgcattgaagtccggctttttaatcctttctcgtttcgcttgctgcgtccgcttggttatatcaccgacttttcccgtctcaatcgccgtatgcacaataaaagtttcactgtcgatggcgtggttaccctggtgggaggacgaaatattggtgatgcctattttggggcaggggaagagccacttttttcggatttagatgttatggcaataggacccgtggtagaggacgttgccgatgatttcgcccgctactggtattgcaaatcggtttcacccttacagcaggtgctggatgtcccggaaggtgaaatggcggatcgcatcgagttacccgcctcctggcataacgatgccatgacgcatcgttacttacgccaaatggaatccagtccgtttataaatcatctggttgatggaacgttgccgcttatctgggcgaaaacacgtttattaagtgatgatccggcgaaaggggagggcaaggcaaaacggcattcactgttaccgcagcgcctgttcgatatcatgggctcacccagtgaacgcatcgatattatctcttcctattttgtaccgacacgcgcaggtgtggcgcaactcttacggatggtgagaaaaggggtaaagattgcgatcctaaccaattctcttgccgctaacgatgttgctgtcgtccatgccggatacgcgcgctggcgcaaaaaattgctccgctatggcgtggaattatatgaactcaagccgacgcgtgaacaaagtagtacgttacacgatcgcggcataaccggtaattccggagccagcctgcatgctaaaacttttagcatcgatggtaaaacggtgtttatcggctctttcaatttcgatccgcgttcaacattgctcaatactgaaatgggcttcgtgatagagagcgaaacgctggcacagttaattgataaacgctttattcagagccagtatgatgcggcttggcagctccgtctggacaggtggggacggatcaactgggttgatcgtcatgcaaagaaagagattattctcaaaaaagaacccgccaccagtttctggaagcgggttatggtcagactggcgtcgatattgcccgtggaatggttattgtaaatgtggcttaacgggctggtgctttatcgttctcacgcttaacaaccggtttaccagaaaacaaaaacttcagtaacgggatgcgtaaatgaatttcatacagaattatcgcaatccctactacgaatatcaggccacagagaaaaccaagccagttggaggtgatgtgcggtgtaatgtatgcgccgaaaaacagcgttaacgggtggtgaaccagatagataaacagcgatgcgttaacaaaataagtcacccgcgctgactggaagttaagcaaacggtggccaaaggagaagaccacattcaccatccacagaccgaggaccatggtgatcaccgactcggtttcgtacatccaggcatcgccactgccatagcgctggttgagtaaataagcgacaaacgccaatgctgctgcaagggtacagccacgagacggcgtggtaaacaaggctttaagatgagggaaaatgaaagccagtgcgccgaggataaagaacggcaaataaaacagcgtttgcatgacaataaaattgaacatgccattactcagaatgggcggatacacaataaaaatcgttcttcttattaccgcataaccgatgccgaggcataaaaaaatcaccgatagttttaccatcgagaattttttattcgttttatcagaattttctaaattatttctgatgcgcttaaatatccatacgcacagcgtcgtcatgaccactaacaccagtaaaaaccacaggtgtgatattaattcccaggccaacgtattatatttgtcatacaatgacagcccaggccaactttccgcttttcctttgacatattgcagcataataaattgcggtaatgtcagtagggggatggctgttaacatcgggatacctacacgttcgacacgtactttccaccattttttcaagggatagcgtaaaaaaagcatgtaggaaaagtagccggatataacgaaaaatacctgcatgcggaacgagtggatgaagtcattaaaaagggtcagccacaatgatgattcggcgctattcacatgccatgtatggctcgaatagattaaagaaatatgaaaaggtatccctaacaacatcagccaggcgcggatggagtcgaggaaatattcacgttgcgcgggtactgggttcatatatggttaactaatctcggatttttcgtcttatccctgtcgggttatgcctttaggcttgttgccatagtgacaccgacctgaccgcgccaggcgcaggcttcaaggtttttatgcatagcatcatcgctaccactaaccagaatggaagcgtctgtaagacggttgataaataaatttgctggcaaaccctacacgaagtcgatgcttctgtctttaggagaagcacggaaagtgaaaacggttgcaatcaggtgcttaatccatgagccagcgtgctgaacgataccgggattctgttgtcggaatggctggttatccattaaaatagatcggatcgatataagcacacaaagggggaagtgcttactaattatgaaacataaactacaaatgatgaaaatgcgttggttgagtgctgcagtaatgttaaccctgtatacatcttcaagctgggctttcagtattgatgatgtcgcaaagcaagctcaatctttagccgggaaaggctacgagacgcccaaaagcaacttgccctccgttttccgcgatatgaaatacgcggactatcagcagatccagtttaatcatgacaaagcgtactggaacaatctgaagaccccattcaaactcgagttctaccatcagggtatgtacttcgataccccggtcaaaataaatgaagtgactgccaccgcagtcaaacgaatcaaatacagcccggattatttcactttcggcgatgttcagcatgacaaagatacggtaaaagaccttggctttgccggttttaaagtgctttacccgatcaacagcaaagataaaaacgatgaaatcgtcagcatgctcggggccagctatttccgcgtgattggtgcaggtcaggtttatggcctttctgcccgcggcctggcaattgataccgccttgccatcgggtgaagaatttccgcgcttcaaagagttctggatcgagcgtccaaaaccgactgataaacgtttaaccatctatgcattgcttgactcgccgcgcgcgacaggtgcttacaaattcgtggttatgccagggcgtgacacggttgtggatgtgcagtcgaaaatctatctgcgcgataaagtcggcaaactgggggttgcaccgttaaccagtatgttcctgtttgggccgaaccaaccgtcgcctgcaaataactatcgtccggagttgcacgactctaacggtctctctatccatgccggtaatggcgaatggatctggcgtccgttgaataacccgaaacatttagcggtcagcagcttctcgatggagaacccgcaaggcttcggtctgttgcagcgcggtcgtgatttctcccgctttgaagatctcgatgatcgttacgatcttcgtccaagcgcatgggtgactccgaaaggggagtggggtaaaggcagcgttgagctggtggaaattccaaccaacgatgaaaccaacgataacatcgtcgcttactggacgccggatcagctgccggagccgggtaaagagatgaactttaaatacaccatcaccttcagccgtgatgaagacaaactgcatgcgccagataacgcatgggtgcaacaaacgcgtcgttcaacgggggatgtgaagcagtcgaacctgattcgccagcctgacggtactatcgcctttgtggtcgattttaccggcgcagagatgaaaaaactgccagaggataccccggtcacagcgcaaaccagcattggtgataatggtgagatagttgaaagcacggtgcgctataacccggttaccaaaggctggcgtctggtgatgcgtgtgaaagtgaaagatgccaagaaaaccactgaaatgcgtgctgcgctggtgaatgccgatcagacgttgagtgaaacctggagctaccagttacctgccaatgaataagacaactgagtacattgacgcaatgcccatcgccgcaagcgagaaagcggcattgccgaagactgatatccgcgccgttcatcaggcgctggatgccgaacaccgcacctgggcgcgggaggatgattccccgcaaggctcggtaaaggcgcgtctggaacaagcctggccagattcacttgctgatggacagttaattaaagacgacgaagggcgcgatcagctgaaggcgatgccagaagcaaaacgctcctcgatgtttcccgacccgtggcgtaccaacccggtaggccgtttctgggatcgcctgcgtggacgcgatgtcacgccgcgctatctggctcgtttgaccaaagaagagcaggagagcgagcaaaagtggcgtaccgtcggtaccatccgccgttacattctgttgatcctgacgctcgcgcaaactgtcgtcgcgacctggtatatgaagaccattcttccttatcagggttgggcgctgattaatcctatggatatggttggtcaggatttgtgggtttcctttatgcagcttctgccttatatgctgcaaaccggtatcctgatcctctttgcggtactgttctgttgggtgtccgccggattctggacggcgttgatgggcttcctgcaactgcttattggtcgcgataaatacagtatatcagcgtcaacagttggcgatgaaccattaaacccggagcatcgcacggcgttgatcatgcctatctgtaacgaagacgtgaaccgtgtttttgctggcctgcgtgcaacgtgggaatcagtaaaagccaccgggaatgccaaacactttgatgtctacattctgagtgacagttataacccggatatctgcgtcgcagagcaaaaagcctggatggagcttatcgctgaagtcggtggcgaaggtcagattttctatcgccgccgccgtcgtcgcgtgaagcgtaaaagcggtaatatcgatgacttctgccgtcgctggggcagccagtacagctacatggtggtgctggatgctgactcggtaatgaccggtgattgtttgtgtgggctggtgcgcctgatggaagccaacccgaacgccgggatcattcagtcgtcgccgaaagcgtccggtatggatacgctgtatgcgcgctgtcagcagttcgcgacccgcgtgtatgggccactgtttacagccggtttgcacttctggcaacttggcgagtcgcactactggggacataacgcgattatccgcgtgaaaccgtttatcgagcactgcgcactggctccgctgccgggcgaaggttcctttgccggttcaatcctgtcacatgacttcgtggaagcggcgttgatgcgccgtgcaggttggggggtctggattgcttacgatctcccgggttcttatgaagaattgccgcctaacttgcttgatgagctaaaacgtgaccgccgctggtgccacggtaacctgatgaacttccgtctgttcctggtgaagggtatgcacccggttcaccgtgcggtgttcctgacgggcgtgatgtcttatctctccgctccgctgtggtttatgttcctcgcgctctctactgcattgcaggtagtccatgcgttgaccgaaccgcaatacttcctgcaaccacggcagttgttcccggtatggccgcagtggcgtcctgagctggcgattgcactttttgcttcgaccatggtgctgttgttcctgccgaagttattgagcattttgcttatctggtgcaaaggaacgaaagaatacggcggcttctggcgcgttacattatcgttgctgctggaagtgctgttttccgtgctgctggctccggtacgcatgctgttccatacggtcttcgtcgtcagcgcgttccttggctgggaagtggtgtggaattcaccgcagcgtgatgatgactccacttcctggggtgaagcgttcaaacgccacggctcacagctgctgttagggttagtgtgggctgttggtatggcgtggttggatctgcgtttcctgttctggctggcaccgattgtcttctcgttgatcctgtcaccgtttgtttcggtgatttccagccgtgccaccgttggtctgcgaaccaaacgctggaaactgttcctgatcccggaagagtattcaccgccgcaggtgctggttgataccgatcgcttccttgagatgaatcgtcaacgctcccttgatgatggttttatgcacgcggtgtttaacccgtcatttaacgctctggcaaccgcaatggcgaccgcgcgtcaccgcgccagtaaggtgctggaaatcgcccgtgaccgccacgttgaacaggcgcttaacgagacgccagagaagctgaatcgcgatcgtcgcctggtgctgctaagcgatccggtgacgatggcccgtctgcatttccgcgtctggaattccccggagagatattcttcatgggtgagttattacgaagggataaagctcaatccactggcattgcgtaaaccggatgcggcttcgcaataaaaacgtagttgcctgatgcgctacgcttatcaggcctacatcgttcctgcaatttattgattttgcaagattttgtaggttgggtaaggcgttcacgccgcatccggcaaaaacaacgagccaataaaaataccggcgttatgccggtatttttttacggaagaggtatcaaatgcgtttaattgtggtgagcatcatggtgaccttgctgagtggctgtggcagcattattagtcgcactataccggggcaggggcatggcaaccaatattatcccggtgtgcaatgggatgtgcgtgactccgcctggcgttatgtcacaatccttgatctgccattctccctggtttttgatactttactgctgccgatcgacattcatcatggcccgtatgagtgattaacgttcatcccactcatcagctgctgcgcgtccttcctcggtatccagcggtggctcaagctgaaattccccctcgtcccattcatgtaatgtattctcttcctgccactcctggcgtatctctatctcatcatagtcgccatcaaaaacactttgcgcggcttcaccgctaagcataggtaaacattcaccttcttccccttcgtcggcaaaaaactcaacttgccacatgatgtcgccgtcctgcaaaacgtatttttgggcattgaactgttgcacattcgcatcttcggcgtcgatgccggggttgtctgcaagaaattcttcgcgtgcagcgtcaatggcttcttcaagcgttgcgtacatggtcatcacgattctccctttgagttgatgaggtttcagggaaaaggatagctgattctccgcttttgcaagtatgaaaggcgaaaaatcagttcgatacctggggtattcgacgacgacgtagactgttccatgaatagactgcgttgaataacactacgccagcggtgacgagaaataccgctctgaaaccgtagttcgctgaaatcgctgctcccatcaatggtccggtaacgttgccaatatcacgaaacgattggttatagctgaagatacgcccggcgatctggttgctcgagttgtaaaccaacagtgtctgtacggcggggagtagtgcaccatcggcggcaccgagcaaaaaacgtaaaatcccaagttgcaatggcgtctgaacgtaagacattgggatcaacagcagtacagaaaagatcagcgctgtaatcaggatcttttcgggtccgattcgatcgccaagtttgccgagtcgtggtgcacttagcagagccgccacgcctggcaccgaggcgatcatgccactgataaaggcgacgttactgacgttacccgccagttcgcggacatacagcgtcagaatgggggcaattgagcccgtcgccacctggatgattaacgtagtgacaaacaggctgagtaccagtttcgggtttttaagtgatgtcaccacttcccgcatgtgcagcatctcttttttgctgaccggctggaatttttctctgatgcaaaacagggtgacgaaaaagcagagtatgagcacactggcggtaataaagaataccggacgtaagccgtagctatcggcgagcaggccgccagccattgggccgagcaacgcaccactaacgccgcctgtggagagcgtacccagcgcccagccgcttttattacgcggtacttgtgtggcgataagagcattagcattggggacaaatccgccaagtaacccaagaagcgcccgcaggatcaaaaactgccagatattttgtgccagccccatcaacaccatcacgatgcccatgccgagggcagagcgtaatagcatgagttttcggcctttacggtcggcgagtccaccccaaaacggtgaggcgatggccgaaaataaaaatgtaatgctgaagacaataccggaccacatattcagggcggagtgaccggtaacgccaagctgctcaacgtagaggggtaagaagggcattaccagactgaaggcggcaccggtaagaaaacagcctagccaggcgatgatcaggtttcgtttccagtttataggggtgtcattttcacagggtgacatagcaatccgctgttggtgcgccaggcgcggtgaacataagaagaaaagataagcacactaattatgcgcccgacttccagggggcgcaatccagagagcttttatcgctaaatcagggggatttgctgtggtaatgccggatgccattctgaagcatccggcatgggagatttaatagcgtgaaggaacgccttccgggcgtgttttaaagcgacggtgtaaccacatatactgctctggtgccatcatgatgcatttttcgaccactttgttcatccacgcggcggtagtttcggcatcatccagtggcggagaacactctggcggcagcataatcaattgataccctttgccatctggcttacggcgtggaacgaagggcaccagacatgcgccggacatccgtgccagcatccaggttccggtcgtggtcgcagcctgctcaacggcaaataaggggacgaaaacgcttgagcgcgggccgtaatcatgatccggtgcgtaccagaccacttcgccttttttcagggctttaatcatgccttttaaatctttgcggtcgagcatcgatttatttgagcgcaaacggccccaggtttgtagccagtcaatcagtggattatcgttcgggcggtaaacgccaatccccggttcctgcataccaaactgccgcgcgcccagctccagtgtcagaaaatggatgccaactaacaggatgccgcgtttttgcgcctgcacgtcacgaatgtgttccatgccgatcacttccgtccagcgggcgattcggcggtccggccagaaccacgccatgccggtttccatcaggcccatgccaacggattcgaaattcttcaccaccattttacggcgttcttgttcgctcatttccgggaagcacagttccaggttgcgatgcacaatttttgcgcgtcgtttcataaaacgtaacgccagttttcctaatccacaaccgaggcggtagataaccgggtagggcaattgcacgaccaaccaaagtacgccaatacccaaccaggttaaccaataacgcggatgaagcagtgcggtggagaacttgggtagattcgtcatatcaatcctgtttttcaacctatacgggcaattgtatgtattgtcgcattttttcgtccgcaaccaaaatttgtgactgaagactgggcgaaattgccgcgcttgtaaataacaaataatttttaatgcgcaaatgtagcgtaaaatgtgtggatgttaattgtcgataattgctatatcatgccgcggatttttactttcccatctcgcaggaaccgtacaccatgccagtgttacacaaccgcatttccaacgacgcgttaaaagccaaaatgttggctgagagcgaaccgcgaaccaccatttcgttttataagtatttccacattgccgatcctaaggtgacccgtgacgctttatatcagctgtttaccgcgctgaatgtttttgggcgagtgtatctggcgcatgagggcattaacgcgcaaatcagcgtaccagcgagcaatgttgaaacatttcgcgcgcagctctatgccttcgacccggctttagagggtttacgcctgaatatcgcgttggatgatgacgggaaatccttctgggtactgcgcatgaaggtccgcgatcgcattgttgccgacggtattgacgatcctcactttgatgccagcaatgttggtgagtatctgcaagcggcggaagtgaacgccatgcttgacgatcccgatgcactgtttatcgacatgcgtaaccactatgagtatgaagtggggcactttgaaaacgcgctcgaaattccggcagataccttccgtgagcagctgccaaaagcagtcgagatgatgcaggcacataaagataaaaaaatcgtcatgtactgcaccggcggtattcgttgtgaaaaggccagtgcctggatgaaacataacggattcaacaaagtctggcatatcgagggcggaattattgaatacgcccgtaaggcgcgcgagcagggcttgccggtgcgttttattggcaaaaattttgtttttgacgagcggatgggcgaacgtatatcggatgagattatcgcgcattgccaccagtgcggtgcgtcgtgcgacagccataccaactgtaaaaatgatggctgccacctgctgtttattcagtgtccagtatgcgcggaaaaatacaaaggttgttgtagtgagatttgctgcgaagaaagcgcgttatcgccagaagaacagagacgccgtcgggcaggacgtgaaaatggcaataagatctttaataagtctcgtggacgtctgaatacaacactgggcattcctgatccaacagaataaatatcattgccggatgcgtgccatccggcaacatttcactcttacttctgctgtacgccttccactgaaataatcagatccacttcctgagaagctgggcctaaatctgtcttgatattgaagtccttgagcttaattttgccttcggcctcgaagcctgcacgtttaccaccccacgggtcgtcgccctgaccaattaatttcgcttccagcgtgacgggtttggttacgccattcagcgtcagatcgccggtaatatccagttcgtcaccgtctttcttcacgctggtggaggtgaatgttgcctgtggatattttgcggtattgaggaaatccgcactgcgaagatgtttatcgcgttcggcgtgattagtatcgacgctggtggtgttaattgtcacattcactttatcggcagctggatttttttcatcaaaggtaaaagtaccgtcgaaatctttaaaggtgccatataaccagctatagccaagatgctggatgcggaagttaacaaaggcgtgctgaccttctttgtcaattttgtaatcggcggcaaccgctgaaccggcagagaacatcagggacgcgaaggttaaaccaagcaggctttttttcattttttatactccatagtcagatgacgactttcccagcatgcgcttcagagtgtcgtctttatcgatgaaatgatgcttcagggccataaatccgtgcataacggacagtactacgacgctccacgcgagccaaaaatgcagggcaccggcaaagtctgcctgtgcgccagcgtcggcaagggtcgcggggacgtcaaaccagccaaaaacgctgatcggtttaccatcggcagttgagatcagatagccgctgatgccgatggcgaacagcaataggtacaatgcgagatgtccagctttcgcggcaagacgagtcatgggcgaataactcggcagcggacccggcggtggagatatgacacgccacagaacgcgaataaccagccccatcattaacaaaataccgatgcttttatgcagttcgggtgctttgtgataccagccatcgtaataactgagcgtgaccatccacagacctaaagcaaacatgccgtagacaataattgcgcttagccaatggaaggccgcagatataacaccatagcgttcaggggtatttgtgaatgacataagtgcatccaaaacgaatttgcgagagaaagaaaatggcgtgtcggagaatgaattgcaacacaaaaataacaaattgaatgatatttatttttatttcaataattttgaattaataatgaaagaatcttcataagtttagtgggttcagcatcagagatgtctggtgagtgctgtagaagcaggaataatctcattcaatttttcacgctaaatgaaagggagattaaatatttgtcagtttatgtcagtgcggaaaactaaaaataaaacacatagatcagatccataattgccaacaatccccagagaaaaagataaagcatcagatgctcgcgaatattattgatgagatagtgcaacagccgacgcattaaatactcctgtaaaaacggcctcattctggaggccgtaatgatgattattggaagcgggaaagcctgaatggcgtcaaatcaaaatcgctttttttgtcttgcgcaaaatcggcagctatttcccctaaaactgacgcaaatttaaaaccgtgcccactcaggccggtaatgagcagtgtattatcgtggccgggtagggtatcgataataaaatcttcgtcaggcgaattatcataggtgcaggcagcgccgtacaggcagcaaccgatacccggcaatacattgcgcaagaacgggaaggcttccgaaccatcgctgaccacttccgcaaacggaacacgttcatccgctgaatggataacctggcctccgttatgtttgccaatcttcaacgcgtcgttttctgccggaaaaccataatattgatcgccattgggcagttcaccggtaaacgccgggaatttattcttcacgctatagcgaccatcggcctgataccaggcaaatactttgcgtacgggctggacaggcagctccgggagcaggtcttttacccatgttcccgcgcagacaatcgcttttttcgcctgatactctccgtcagccgtttcaatagttacgccatcatcgtcatgacgaattgcggtgaccgggcagttgaacagctgcgcacagcccgcttccttcgccagttggatccaggttttaatcgccagttcgctgcgcaaaaaaccggaatcagtctcaaataagccgatgtagttgtccgggacgcgtatttctggccagcgggccataatcccttgcgcgtcgagcttttcgacgttgagttgccactgttcggcgctgtgggcgacgttggcgagaaatgcggagtcagccgggccgaggttaatgacaccagagcgtacaaaaatgggatcatcttcgttgtggcgggagagctcatcccacagtgtttgcgcgcggagtaccagtgggacatacttttcgccttcaccataagcatggcgaattaatcgcgtatcgccgtggtggctgccgtgttgatgcggtggcatatgggcgtcggtcattagcacgtttaaaccggcgcgggttgcataatacccggcggcagcgcctacggaaccgctgccaataatgatgagatcgtatttcatttttttctctctgctctcatggtttaagcagagtaattaactgaatgcagatatacaacccagaaatggtaaaggcaccggtgaggtgccttttgggtggatggtcatgtcatgttaatgacgccgatactcgtttaccgggaaatcaccggattcaattttggcgattcctgcttctaatatcgaaataaattgtctggcaacatcagtggttaaccagagcgtctgaccaacttcagtcccttcctgctcggacttatttggggtctggtagtgcaaacgcaacatcagcgcatcatagctatcaacggtgctgatgtcccaccctacgagcggatgagtctgaatgacttcattatttttttccatcatggccccctaattcgtgttactagacaacgttattcgaggttcaatgcgtttttatctgaagcaacttcagtataccaataagtaagggtattcaccgaatttttaaaggggggaacagataaatttctgcttttaagatttatatgaacaataaaacagcatgtcattcatatttttttagcatattgtgcaattattttgaggaagtgtagaaattttgtactcaaaattcgtaagtaaaataaaaaagccggggcgacccggcaaaaacaaaaatcactgcatattattcgctgacaaaccagtcatcggcgctttcccacgtttcctggagaatttcgctaatgcgctgtttatcttcttttgtcgcgccaataaccgataaattattcgctgcggcataacgtactgatacgtggccttcattatcaggaaacgcatactgaatacggcgggaaagttcgccagccagggcgtcaatagccccagctggcaatggagaagttttcgctatggtgacttcaattcgcataatagccccctgttgaatatactggttatttatacaggtaaaataacctaatgacaacaggaagctacgatttttattgtttaacggaccagcgtaccgtttccccggcgaggaatggcaccagggtgtcatcagtcagtgcgatgctttcagcaacctgttgctcttcacgtaccagttcgatgaatgtgtcgttgaccggtaacccatagaactgcgggccgtttacagaacagaatgcttcaaagtgctgcagagcattcatctcttcaaagacggtggcgtaacttcccagcgcggttggggcgttgaagcagcccgcgcagccgcaggtgctctctttgcgatgacgtgcatgtggcgcagaatccgtaccgaggaatactcgattaaaaccgctggcgaccagttcacgcagtgcctgttggtgaatattgcgtttgaggatgggtagacaatacaggtgcggacgcacgccaccaaccagcatatggttgcggttaaacatcagatgttgcggagtgatggtagcagccagtcgttcatttccgtcacggacatagtcggctgcgtctttggtggtgatgtgttcaaaaacgactttcagtgcagtcaggcgctggcgcagcggttccatcacgctttctataaagcgcgcttcacgatcaaaaatgtcgatatctgcatgtgtcacttcaccatgcaccagtagcggcataccgattttttccatgcgctcaagtaccggcatgattgcatcaattgacgtcacgccgtggctggagttagtggttgcgtttgccgggtaaagttttgcagcggtgaacacgccttcgttaaatccgcgctccagctcattaggatccagcgaatctgttaaataacaggtcatcaatggggtgaagtcgtgcccggcaggtacggcgtcaagaatacgttggcgatacgccacggcagcctcaacggtggtcacgggcggagccagattgggcattacgatagcccgtccataaatttcgctggtatacggcacgacagtttttaacatgtcgccatcgcggaggtgaaggtgccagtcgtctgggcggcggatctttaatacctgggatggtgcagtcattaatctctatgctccggctgaagggatgtttttgccggacacaaaggataagcggaaacgttttcctttgcacgaaaaataaagggcgcaaatgcgccctcgtgattaatcagtaaatggaatgacaatttcgcctggcttcacttcaatgcctttcgccagttttttcgccattgcttcgccctggctgccatcttcgcgcaggacgtaagcaggttgctggttaaagtaattgcgtaatgcctggttcaaatagggaagcaacgtttgcatcaccgtttgcattttttccggttgtaccgtcgcatcgaccacttccatctctttcaggaagatcgcacctttttctttatcaaacacgggcagcgctttcaccttcagtttcatggtcgctttctgactaccgaacagggagttcatgtccagattggcgtctccggttagggtaaccttattcggctcttcgcgaccaatttggctggtcaagtttgtcagaacaatatgggcgtcagccacgccgggtaaaccgatatcttttgagaaattattatgtttcgcaagcgactggttaatttcttgttcggtgatggtgtattgggtgagttgattacagccaacgagcaggccactgacgatcaatgcagcggcaaataaaaacttgttcatggtagtcctcgacatgaaatctgcgtcaatatcctgacacaacgcagcatgtgtcaccagcgataaactcgccagcagaaaaaactgaaaacggcggcaacccgcgaatacaggctgccgcggcgggtcaggattaaatcgccattgatgataacaaattgatttgtgtctgtttcgccatattatcgcggtaatcagcaacgcggcttggccagttgattccggctaccagcgtcagattacgcagtagcggaaatagctgaatatcatcttccgaaagttcgccattcacggcgttcggtttgacgatcagtttgtccagcgcacgcaaatcatcgctgatattcttaatcagaccgtcagagtgggccagcaggtcggcaaaattacccgcgctggcctctttcttgtcgacgaaatatttgcgcgcggcgggagtagaaaactcatcaaatgccgatttggcaaaacgcggcaacagcagtttgttggcgtagccattgactttgcgcagccactcttcaatggcaggggaacgtttgccggtcagtaacggtttgccgtcgagtttatcgacatagtgaacgatatccatgctttctggcatatagcggctgtcatctttttgcagaatgggaacctgtttttgaccgaccatccgggtgggtgtttctgcgtcgtcgttgagcagaacatgtaattcgacggggatatttttcaggccgaaaatcatgcgggctttgaggcagtaagggcagtgatcgtaaatgtatagcttcacgtgactcctccatttggctgtcagttcactttcagtatggaggagtcaggggggagtatcaaatcaggcgtcgcgttccagcaaacgacgcgcggcgcgtttttgactaaactgccaacccagcgcaaggaaagtgaagatgccaataattcccagcatcatccacggaagctctggctggtgcgccgatttgcccaggtcaaacagccagccgccaccgatataaccaatagcgccaccaatcgccagacccagacggctaaaccccatatagctgccgcgagctcttgcgtccgccagcgaagcacttaaggtttcacgcgcaggctcggcaatgatcgacccgatataaaacagacaaatcagggtgaaaagttgttgcaggccgctgaccatgcccaccggcatcatgcttaatgacattatcaacagcccagccatcaaccggtgttccaggcgaaaatgcttttcactccagcgggcgataggatagagcaacgttaacgacagacacgcttcaatggcatacatccatttaacggcagagggcgcgcccgccacgtcgttgaccataattggcagcatcagcatcacttgaacagccagcatgtagtaacccgccagcgtcaggacataggtgacaaaacgcttgtcgcgcatcacgcgggtcatgccttcgcgaacgggcgtgcgtacggtggagagtttccatgccggtaataaccacgcattgaacgctgcacacagtacaaacaaaacggcccctgtggcgcagaccaggcgaaagtcgtattgcaacagccagctccccaacaatgcgccaatgaccgcaccggcactgtcctgcatcatcaacagcgagaaaaaacgaccacgttgttgtggacggattagtttcaccaccagcgccgaacgcggcggatcaaacaacgtgccgccgagtcccgaaagcaggcatgaaaaccacaatagccacggttcgtgggcgatacccattgtggcgaatccggcggcacgcatcagcataccggtaacaatcatcggtttggcaccaaagcggtcggcaattgcgccgccgaaaatacccagaccttgctgaataaattggcgtagaccgagagcaataccgaccatgacggcggcccagcccatttgatcaacgaagcggatagagatcagcgggaagacaacaaagaaccccagcacgaccagcatattatcgatgagcaggaaatatttacccaggttcctcgcctgcgacacgcgggacatttcccctcccgggaaataaaagatgagcactttctattctgcattgccgctaagacttttcccatcacttcggggacaatatttttttatcaaaacgtcgctttgatagagagtttttatcaaatatgtgaataatgcagaaaatggcattttggacttttcacagggtctggttgcgcaggtatagtaatacttacagcgtattaaagacgttacgggaaggagtaggtatagaatgtttggctatcgcagtaacgtgccaaaagtgcgcttaaccacagaccgactggtcgtgcgtctggtgcatgatcgtgatgcctggcgtcttgcggattattacgcagagaatcgccatttcctcaagccctgggagccagtgcgcgacgaaagccactgttatccatcaggctggcaggccaggctggggatgattaacgaatttcataaacaaggttcagctttctactttggcttattcgacccggacgaaaaagagattattggcgttgccaatttttccaatgttgttcgtggctcttttcatgcctgctatctcggttattcgattgggcaaaaatggcagggcaaaggactcatgtttgaagccctgaccgcagccattcgttatatgcagcgcacccaacatattcatcgcattatggctaattatatgccgcacaataaacgcagcggtgatttactggcgcgactgggttttgaaaaagaaggctatgcgaaagactatctgttgattgatggacaatggcgcgatcacgtactgacggcattaactaccccagactggacgcccggccgctaaggagaatctcatgaaatatcaacttactgcccttgaagctcgcgtgattggttgcttgctggaaaagcaggtgaccacgccggagcaatacccgctctcagtcaatggtgtagtcacggcctgtaatcagaaaacgaaccgtgaaccggtcatgaatctgagtgaatccgaagtgcaggaacagctggataatctggtcaaacgtcattatctacgcacagtgagcggttttggtaatcgggtcaccaaatatgagcaacgtttttgtaattcagaatttggcgatctgaaactgagcgcagcggaagtggcgttaatcaccacgttgttattgcgtggtgcccagacgccaggtgaactgcgcagccgcgccgcgcgaatgtatgaattcagcgatatggcggaagtggagtcgacgctggaacaactggcaaatcgcgaagatggtccttttgtggtgcgtctggcccgcgaaccgggtaaacgcgaaaaccgctacatgcatcttttcagtggtgaggttgaagatcagccggcggtgacggatatgtcgaacgcggttgacggtgatttacaggcccgcgtcgaagccctggaaatcgaagtggcagaactgaaacagcgtcttgattcgttgctggcccatctgggagattaaagtgaaaaaattacgtatcggcgtagtgggattaggtggcattgcgcaaaaagcgtggttaccggtgctggcggcagcgtctgactggacgttacaaggagcctggtcgcctacgcgcgcgaaagccctgccaatttgtgaaagctggcgcattccttatgccgattcgttatccagccttgccgccagttgcgatgcggtttttgtgcattccagcaccgccagccactttgacgtggtcagtacgttactcaatgcgggggtacatgtctgtgtcgataaaccgctggcagaaaatctgcgcgatgctgaacggctggtggaactggcggcgcggaaaaaactgacgttgatggtcggttttaaccgtcgtttcgcaccactctacggtgagttaaaaacgcaactcgccaccgcagcctcgctaagaatggataaacatcgtagcaatagcgtcgggccacacgatctttatttcacgttgctggatgattatctgcatgtggtggataccgcgctgtggttgtcgggcggcaaagcctctctggatggcggtacgctactgactaacgacgctggcgaaatgctgtttgccgagcaccatttttcggctggtcctttgcagatcaccacctgtatgcatcgccgtgccggaagtcagcgtgaaaccgtgcaggccgtgactgacggtgcgctcatcgacattacggatatgcgcgaatggcgtgaggagcgcgggcagggcgtagtgcataaaccgattcctggttggcagagtacgcttgagcaacgtgggtttgtcggctgtgcgcggcacttcattgaatgtgtgcaaaaccagacagttccgcaaaccgccggcgaacaggccgtgctggcgcaacgtatcgttgacaagatctggcgcgatgcgatgagtgaataaaccctgtaacatctggcggtagcaattcaccataatccaggtagactattcgcctctttcagcgcctgccttgcaggcgttttgcccgtgggtctggattagaacaccgatgaatttattaaaatcgctggccgccgtcagctcgatgaccatgttttcgcgtgtgcttggcttcgcacgagacgcaattgtcgccagaatctttggcgcagggatggcaaccgacgcctttttcgtcgcttttaaacttcctaacttgttacgccgtatctttgccgaaggggcattttcccaggcatttgtaccgattctggcggaatataaaagtaagcagggtgaagacgccacgcgggtctttgtctcttatgtttctggcctgctgacacttgcgctggcggttgtgacggtcgctggcatgctcgccgcaccgtgggtgatcatggtgaccgcgccaggcttcgctgacacagctgacaaatttgccctgaccagccagctactaaagattacctttccctatatcttgctgatctccctggcgtcgctggtgggagcgattctgaatacgtggaaccgcttctcgattccggcgtttgctccaacactgcttaacatcagcatgattggtttcgcgctgtttgccgcaccgtactttaacccaccggtgctggcgctggcgtgggctgttacggtcggcggcgtcctgcagctggtgtatcagctaccgcacctgaagaagatcggcatgctggtcctgccgcgcattaacttccacgatgccggagcaatgcgcgtggtgaaacagatgggaccggcgatccttggcgtctctgtgagccagatctccttaatcatcaacaccatttttgcctcgtttcttgcttccggttcggtgtcttggatgtattacgccgaccgcttaatggagtttccgtccggtgtgctgggcgtggcgcttggcaccattttgctgccgtcgctgtcgaaaagttttgccagtggcaatcatgatgaatacaaccgtttgatggactgggggttgcgtctttgtttcctgttggcgctgccgagtgcggttgcgttgggcattctttccggtccgttgaccgtttcgctgttccagtacggtaaatttaccgcgtttgatgcgctgatgacccagcgggcgttaattgcctactcggtgggtttgattggcctgattgtagtgaaagtgttggctcctggcttttattcccgccaggacattaaaacgccagtgaaaattgccatcgttacgctgattttaacgcaattgatgaacctggcgtttattggtccgttgaaacatgccgggatgtcactttctattggtctggcggcgtgtctgaatgcttcgctgctttactggcagttgcgtaagcagaaaatctttaccccgcaacccggctggatggcgtttctgttgcgtctggtggtggcggtactggtgatgtctggcgtgcttttaggtatgttacatatcatgccggagtggtcattgggtaccatgccctggcgtttactgcgtttaatggcggtcgtgctggtggggattgccgcgtacttcgctgcactggcggtactgggcttcaaagttaaagaatttgcccgccggacggtgtaacaatgcattccggcctgcagtgcaggccggagataatattcagatcgaaatctttttaccgccgcgatgggttgttgaggtctgaccgttcgccccatatagcgtcggttcctgatgcggtttcaacatttccagcgcctgttgattgcgctcaatctgtccttccagtaaccagccgttatgttgattcatttggcgtagttgctgcgttttcacagtaatttcctgccagcgttgactaatatcaacgctatttgctgtattgggttctttcttgcgtaactgttcgaggtaatccagcgtcgccagcagtgagcttttttgttctgtaatccattgcaactggctgccgttgatctgccccatagagagatgttgctgttcttgatccattaccgttttgagatcgttaagcacagcggacatctggtcgaggatctctgcaagacgtgtcatacgatcagttactctgcaagtcttgctgcgcttcgttgatcagcgcatcggcaattttgccggtgtccatttttagttcaccgttacgaatcgccagttttaacgcttcgacacgttcaagattgatatcactgctgccgggttgcatcagttttgcttgcgcgtcgcttaacgtcacactggtgctggtggaggctgttgtttttgccgcccgggtgttcgttaccggcgcgtcagtggtttcgcgcggttgaacggtgcttacaggcttcagaggcgaagtgcgatcaatactcatggtttattcctcattgagggcgcttttatcatgtgttgcttatttatcggcaagggacgggtaatctttaacagcttacaggtttataagaatattcccatctgcatcaacaacgccgctgactacctgtcccgataccatgcgcacccgcgcattctgtgcgacggctgcattgttcagcgcctgaccttctgcgttggcgctaaacccatcaccgctggcgatcacattgacgcgttgtcccgcttttacccgccatgcctggcgaaactgggttaactggataggttgatcgggtgatagatcgcgcaggctaatggcatcaacaagttgattgatatccagcaccgtacgcggtggcagggtatccagccgtccgcgtttcagtttgacattgccagcttccagctttcctccccgcgcaatgggcatcgcggcaaccacataatttcctgtggcctgtacattaacctgtaaatatcgtttgtcgttaccgcagcgtgccaacacattcacattgccccacaggcgggaattattgctcatcgaaagcaatggctgctcgcatggcggtagtagattgggcgctgtacgaatagaaacacgaacctcatcacttacccccgcgagttgggcgctaaaaaagttgtgcaattgcgatgtgagattgctcgccgtacttaacggactgaacagtatcgcgatgatcgccacgctacgttttattatcagcattttcgcccccagccatttctacaacgtgaattgtacctgtccgcaatgaccatcaacggcataaatagcgacccattttgcgtttattccgccgataacgcgcgcgtaaaggcatttaagctgatggcagaattttgatacctgcggaggagatatgctcgataagctcgacgccgccttacgttttcaacaagaggcgctcaatctgcgcgcccagcgtcaggaagtgctggcagcaaacatcgccaatgccgatacccctggttatcaggcgcgcgatatcgattttgccagtgaacttaaaaaagtcatgcaacgtggacgggatgcaaccagtgtggttgcactgacgatgacctcaacgcaacacattccggcgcaggcgctgacgcctcctaccgcagaactgcaataccgtattccggaccagccttcgcttgacggtaataccgtcgatatggatcgcgaacgcacccagtttgccgataacagcctgcaataccagatgagccttagcgcgttgagcgggcaaatcaaaggcatgatgaacgttttacagagcggaaattaacggatggcactgctgaatatttttgatatcgccgggtcggcgttaactgcccagtcccagcgcctgaacgtggcggccagtaatctggcaaatgctgatagcgtgaccggtcctgatggacagccatatcgggcaaaacaggtggtattccaggttaacgctgcaccaggtgctgcgacaggcggcgtaaaggttgccgatgttatagaaagtcaggccccggacaaactggtttatgaaccgggtaatccgctggcagatgcaaagggctacgtaaaaatgccgaacgttgatgttgtcggagagatggttaacaccatgtcggcgtcacgcagctatcaggccaatgttgaagtgctcaacacggtgaaaagcatgatgctgaaaacccttacgctcggtcaataaaggagaaagctatgtccattgcggtaaccaccaccgatccgacaaataccggcgtcagtaccaccagcagtagttcgctcacgggcagcaacgccgcagatttacaaagcagttttctgactttgctggtggcgcagctgaaaaaccaggacccgaccaatccaatggaaaacaacgagctgacgtcgcaattggcacaaatcagcacggtcagcgggattgaaaaactcaataccacgctcggatctatttccggacagattgataacagccagtcgttacaggccagtaacctgatcggtcacggcgtgatgatccccggcaccactgttcttgcgggaaccggcagtgaagaaggggctgtgaccacgaccacgccgtttggtgttgagctgcaacaggcggcagacaaagttacggccaccatcaccgataaaaatggcgcggttgtgcgcaccattgatattggtgaactgaccgccggagttcacagtttcacctgggacggtacgttgactgatggcagcactgcgccgaacggttcttacaatgtagcgattagcgccagtaacggtggtacacaactggttgcccagccgctgcagtttgctctggtgcagggtgtgatccgcggcaacagcggtaatacgctggatctcggcacttacggcaccaccaccctcgacgaagtacggcagataatttaagccttcacatttcaggagtcagtcatggccttttctcaagcggttagcggattaaacgctgccgccaccaacctcgatgttattggcaacaatatcgccaactccgccacctacggctttaaatcaggcacggcctcttttgccgatatgtttgccggttcgaaagtgggactgggggtaaaagttgccggtatcactcaggactttaccgatggcacgaccaccaacaccgggcgaggtctggacgttgctatcagccagaacggttttttccgtctggtagacagcaacggttcggtgttctacagccgtaacggacaatttaagctggatgaaaaccgtaacctggtgaatatgcaaggtttacagctgacgggttacccggcaaccggtacgccgccgactattcagcaaggggcgaatccgaccaatatttcgatcccgaataccctgatggcagcgaaaactaccaccacggcatcgatgcagatcaacctgaattccagtgatccgcttcctactgttacgccattcagcgccagcaatgcggatagctataacaaaaaaggttcggtgactgttttcgacagtcagggtaatgctcatgacatgagcgtctactttgtgaagaccggggataataactggcaggtctacacccaggatagcagtgatccaaacagcattgcgaagacagcgacaacactggaatttaatgctaatggcacattagtggatggtgcgatggcgaataatatcgcaaccggcgcaattaacggtgcagaacccgccacgtttagtctgagcttcctcaactccatgcagcaaaataccggcgctaacaatattgtggcaaccacccagaacggctacaaaccgggcgatctggtgagttatcaaatcaatgatgacggtacggttgtcggcaactattccaacgaacaaacccaactgctggggcagattgtactggcgaactttgccaacaacgaaggtctggcatccgaaggcgacaacgtctggtctgcgacgcaatcttctggcgtggcgctgttggggacagccgggacgggaaactttggcaccctgaccaacggtgcgctggaagcgtccaacgtcgatctcagtaaagaactggtcaatatgatcgttgcccagcgtaactatcagtctaacgcccagaccatcaaaacccaggaccagatcctcaacacgctggttaacttacgctaatcgctgacgggatagctcaatggatcacgcaatttataccgcgatgggagcagccagccagacactgaatcaacaggcggtaaccgccagtaatctggccaatgcctcaacgcccggttttcgcgcgcagttgaatgctttacgcgcggtgccagtggaagggctttctctgcccacgcgcacgttggtcacggcgtcaacgccgggcgcagatatgacgcccggcaaaatggattacacctcgcgcccgctggacgtcgcgttgcagcaggatggctggctggccgtgcagaccgctgacggcagcgaagggtatacgcgtaatggcagcattcaggttgatcccaccgggcaactgacaattcaggggcatccggtgataggcgaggctgggccaattgctgtgccggaaggggcggaaatcactattgctgccgatggcacaatctcggcgctcaatccgggcgatccggcaaatacggttgcgccagtagggcgtcttaaactggtgaaagccacgggcagcgaagtgcagcgcggtgacgacggcatttttcgtttaagcgcagaaacccaggccacgcgtgggccggtactgcaggcagatccaaccttgcgtgtgatgtcgggggttctggaaggcagtaacgtcaatgccgttgcggcaatgagcgacatgattgccagcgcgcggcgttttgaaatgcagatgaaggtgatcagcagcgtcgatgataacgcaggccgtgccaaccaactgctgtcgatgagttaattgaaaggatacatgacaagtataagttgcccgatgcgcaagtttatcgggtctatgggggcaatcgcaatttatcgattttgcgagcacttgtaggccggataaggcgtttacgccgcatccggcaagaagacatatgcactttgtcactaatccactacaggacattttatgatcagttcattatggatcgccaaaacgggccttgacgcccagcaaaccaatatggacgtcattgccaacaacctggcaaacgtcagtactaacggttttaagcgtcagcgcgcggtgtttgaagatctgctttatcaaaccattcgccagccgggggcacagtcttccgaacaaaccaccttaccctccggattacaaatcggcacgggggtacgcccggtcaccactgaacgcttacacagccagggaaacctgtcgcagaccaacaacagcaaagatgtcgcgattaaagggcagggctttttccaggtgatgttgccagatggttcatcagcctatacccgtgacggctctttccaggtggatcagaacgggcagctggtgacggctggtggttttcaggtgcagccagcgatcaccattccggcgaatgcgttaagtatcaccatcggtcgtgatggcgtggtcagcgtaacccaacaaggccaggcagctccggttcaggttgggcagctcaatctcaccacctttatgaatgacaccgggctggagagcattggcgaaaacctctacaccgaaacgcaatcctctggtgcaccgaacgaaagcacgccgggcctgaacggcgcgggactgctgtatcaagggtatgttgaaacgtctaacgtcaacgtggcggaagaactggtcaatatgattcaggtgcaacgcgcttacgaaatcaacagtaaagcggtgtccaccaccgatcagatgctgcaaaaactgacgcaactctaaggcttaaccggtggcaggttcaccggtttactgatttttgaagatgatagccatgcaaaaaaacgctgcgcatacttatgccatttccagcttgttggtgctttcactaaccggctgcgcctggataccctccacgccgctggtgcagggggcgaccagtgcacaaccggttcccggtccgacgcccgtcgccaacggttctattttccagtctgctcagccgattaactatggctatcaaccgctgtttgaagatcgtcgaccacgcaatattggcgatacgctgaccatcgtgttgcaggagaacgtcagcgccagcaaaagctcctctgcgaatgccagccgtgacggtaaaactaattttggctttgatactgtgccgcgctatttgcaggggctgtttggtaacgctcgtgccgatgtcgaagcctccggtggtaacacgttcaacggaaagggcggggccaatgccagcaatacctttagcggcacgttgacggtgacggttgaccaggtactggtcaacggcaacctgcatgtggtgggtgaaaaacagattgccattaatcagggtaccgaatttattcgcttctctggcgtggttaatccacgcactatcagcggcagcaataccgtaccgtctactcaggtggcggatgcgcgcattgaatacgtaggcaatggctacattaacgaagcgcaaaatatgggctggttgcagcgtttcttccttaacctgtcgccaatgtaagtgaggctgtggtgattaaatttctctctgcattaattcttctactggtcacgacggcggctcaggctgagcgtattcgcgatctcaccagtgttcagggggtaaggcaaaactcactgattggctatggtctggtggtggggctggatggcaccggtgaccagacaacccagacgccgtttaccacacaaacgcttaataacatgctctcacagctgggaattaccgttccgacgggcaccaatatgcagctaaaaaacgtcgctgcggtaatggtgacagcgtcacttcctccgtttggacgtcaggggcaaaccatcgatgtggtggtttcttccatgggaaatgccaaaagcttgcgtggaggtacgttgttgatgacaccgcttaagggcgttgacagtcaggtgtatgcgctggcgcagggcaatattctggttggcggcgcaggagcctccgctggcggtagcagtgttcaggttaaccaactgaacggtggacggatcaccaatggtgcggttattgaacgtgaattgcccagccagtttggcgtcgggaatacccttaatttgcaacttaacgacgaagatttcagcatggcgcagcaaatcgctgacaccatcaaccgcgtgcgtggatatggcagcgccaccgcgttagatgcgcggactattcaggtgcgcgtaccgagtggcaacagttcccaggtccgcttccttgccgatattcagaatatgcaggttaatgtcaccccgcaggacgctaaagtagtgattaactcgcgcaccggttcggtggtgatgaatcgcgaagtgaccctcgacagctgcgcggtagcgcaggggaatctctcagtaacagttaatcgtcaggccaatgtcagccagccagatacaccgtttggtggtggacagactgtggttactccacaaacgcagatcgatttacgccagagcggcggttcgctgcaaagcgtacgttccagcgccagcctcaataacgtggtgcgcgcgctcaatgcgctgggcgctacgccgatggatctgatgtccatactgcaatcaatgcaaagtgcgggatgtctgcgggcaaaactggaaatcatctgatgatcagcgacagcaaactactggcaagtgcggcctgggatgcgcaatcactcaacgaactaaaggcgaaagcgggcgaagatccggcggcaaatatccgtccggtggcccgtcaggtggaagggatgttcgtgcagatgatgttgaaaagcatgcgcgacgctttaccaaaagatggcctgttcagcagcgagcacactcgcctgtataccagtatgtatgaccagcagattgcccaacagatgacggcgggcaaaggtctggggcttgcagagatgatggttaaacagatgacgccagaacaaccattgccagaggagtccacgccagcagcaccgatgaaattcccgctcgaaactgtggtgcgttatcaaaatcaggcgctttcgcagctggtgcaaaaggccgtgccacgtaactacgatgattcgctgccgggtgacagtaaagcattcctcgcgcaactctcgctgcccgcccaactggcaagccagcaaagcggtgtgccacatcatttgatcctcgctcaggcggcactggaatctggttgggggcaacggcaaatccgccgcgaaaacggcgagccgagctataacctgtttggtgtcaaagcctctggcaactggaaagggccagttactgaaatcaccacgactgaatatgaaaacggcgaagcgaagaaagtaaaagcgaagtttcgcgtctacagctcgtatctggaagccttgtcggattacgttgggctgttaacgcgtaacccgcgctacgccgccgtgacgaccgccgcgagtgcggaacagggggcgcaggccctacaggacgcgggctatgccaccgatcctcactatgcccgcaaactcaccaacatgattcagcagatgaaatcgataagcgacaaggtgagcaaaacctacagtatgaacattgataatctgttctgaataactcaagtccggcgggtcgctgccgataatactctgtaattgaaggcttataaggaacctccatgtccagcttgattaataacgccatgagcggactgaacgcggcccaggcggcgttaaatacggcaagtaataatatctccagctataacgttgccggatatacccgccaaaccactattatggcgcaggccaatagcacgttgggcgctggcggctgggttggcaatggtgtctacgtttctggtgtgcagcgtgagtatgatgcgtttattaccaaccagttacgtgcggcgcagacgcaaagtagcggtctgactgcccgctatgagcagatgtcgaaaatcgacaatatgctctccaccagtacctcttcgctggcaacacagatgcaggatttcttcaccagcctgcaaacgctggtgagtaacgcggaagacccggcagcgcgccaggcgctgattgggaaatcagaaggattggtgaatcagtttaaaaccaccgatcaatatctgcgcgaccaggacaaacaggtcaatatcgcgataggtgccagcgttgatcagatcaacaactacgctaaacaaattgccagcctgaacgatcaaatctcgcgcctgacaggcgtgggggcaggggcgtcacctaacaatctgctggatcaacgcgatcaactggtgagcgaattaaaccagattgttggtgtagaagtcagcgttcaggatggcggcacttataacatcacgatggccaatggttactcactggttcagggaagtacggcgcggcaactggcggcagttccttccagcgctgacccttctcgtacgactgtcgcttatgttgatgggacggcaggcaatattgagatcccggagaaattactgaataccgggtcgctgggcggcattctgacattccgttctcaggatctggaccagacgcgtaatacgcttggacaactggcgctggcatttgccgaggctttcaacacccaacacaaagccggatttgatgctaacggcgatgccggtgaagatttctttgctatcggtaagcccgcggttctgcaaaacacgaaaaacaaaggtgacgttgcgatcggtgccacggtaactgatgcctccgcggtactggcgacagattacaaaatctcgttcgataataatcagtggcaggtcacccgccttgccagcaataccacttttacggtgacgccggatgccaacggtaaagtggcatttgatggtctggagttgacgtttacaggaacgcctgccgttaacgacagcttcacgctgaaaccagtaagtgacgccatcgtcaacatggatgtattaatcaccgacgaagcgaaaatcgcgatggcgagcgaagaagatgcgggtgatagcgacaaccgcaacggtcaggccctgctggatctgcaaagcaacagtaaaacggtgggcggtgcgaaatcctttaacgacgcttatgcctcgttagtgagtgatatcggtaataaaaccgcgacgttgaaaaccagtagcaccacgcaaggtaatgtggtgacgcagctttccaatcagcagcagtcgatttccggtgtcaatctcgatgaggagtacggaaatctgcaacgttttcagcagtattacctggcgaatgcgcaggttctgcagacggcaaacgcgatttttgatgcgctgattaacattcgctaaggggagataagatgcgtttcagtacccagatgatgtaccagcaaaacatgcgtggcatcaccaattctcaggcagaatggatgaagtacggcgagcagatgtcgacaggtaagcgagtcgttaacccttctgacgatcccattgcagcatcacaagccgtagttctctcccaggcacaggcgcaaaacagccagtacacgctggcacgtactttcgccactcaaaaagtgtcactggaagagagtgtacttagccaggtcaccaccgctatccagaatgctcaggaaaaaattgtctacgccagcaatggcaccttgagtgacgatgaccgggcctcgctggctacggatattcaggggcttcgtgaccagttgctgaatctggcgaacaccactgacggtaacgggcgttacatttttgccggttataaaacagaaactgcgccgtttagtgaggctaacggtgattatgtcggcggaacagaaagtattaagcaacaggtcgatgcttcgcgttcgatggtgatagggcacacgggtgacaaaattttcgacagtattaccagcaacgcggtagcggaaccagacggtagcgcttctgaaaccaatctttttgccatgctggatagtgccatcgcagccctgaaaacgccggtcgcggatagcgaagcggataaagaaaccgccgctgcggcgttagataaaaccaaccgcggactgaaaaactcgctgaacaatgtgctgactgttcgcgcggaattaggcacgcagctgaacgaactggagtcgctggattcattaggtagcgatcgcgctttagggcaaacgcagcagatgagcgatctggttgatgtggactggaatgcaactatttcatcttacatcatgcagcaaacggcattgcaggcatcgtataaagcatttaccgatatgcagggattgtcgctcttccagctcaacaaataatttcgctttaaaacatatcatgaaactgggtatgttttgtctgcctgctctgggatcgctggggcgggcatttttttgcctattttgcattgttggttagcaaggatgccattcgatgaattttaatatgttgattcaaagatgaaataaaaaagccctggcagttaccagggcttgattactttgagctaattattactcaacaggttgcggacgcgcaggagcggcagaggcatgatgtgttgccgtatgaccacctgcggcacctttaccttcgaaggcaaaagtagggcgctgccagtcactgtgacgcggtgcctccggaacatattccggtgctggagcgcgcgtcattggcgcggtagcgtggttatgctcaacggtgacctcaggttcgaccgcagctaccgtttcaacttctgctgcgacttcagcgactactggcgcggcaggttgagcaacaacttcaggttcagcaactacaacctcagcagtttcgacaacttcttcaatatctgccgtctcttcctgcggttcaaccaccggttctgcttgttctgcaacttcctgggctacggcaacatcagactcggtaatcacctgcggctgttcagttaccgcggcagcgatcacttcaggatgcgtcgtttcaaccacttccggttgcggttcggcaacctgaacgggggcttctacgacaccggccacttcttcaacaactggcgcgctaacaaccggttcgatagcggcggcgacagggacctcagtcaccatcggctgcacatgtacttcttcctgttcgcgctgctcttcaacctgtacatcttgcggacgtacaattggatagcggatccagactttgccagaggccagttccggagacgcgcacgctacggtcaacggcattggcgactgggttggataacgctcgtcacgatagcgacgacgacgctgaccacttacgcgcaggtgacgaggcgagcggcgagaacgacgcggcatgccaccgttgtcacggttatcagcattgttctcttcttgctgttctggtgcagtttgcgctacgactggcagcgggactttcaccagttctgtgcgtggagctggcgcttcctgaacaattggttcggcagtgacagtttcttcaaccaccggtgcgactaccgcttcttcggctacgctttgctcgtaacgcactttctgattgagctgacgctgtttacgacgcggctgaaccggacgtacacgttcttcctgttcggtttcctgaacagattgctcttcaacattcagcgccttcgcttcttgttgcgcctgacgtttatcatcattacggcggcggctacgttcacgacgcggcgcttgctgctcgtcggtggtacgcgctttttccgttacctcagcctgctgacggctctcacgcgtctcggcagtctgctgctgtgcctggcgacgattacgacggttttcttcgcgattatcgctgccttcagtacgttcactacgggtgtcgcggcgctcattacggtcacggcggttgttctgacgaggcttgcgacgatcctgttgacgttccggtttcgcttctgctttcggtgttggttgctcggacggtttggtttcttcaccaccgctgaacagcgctttcagtgcgccgaagaagcggctcaacagcccaggttgggcaggagcggctggtgttgccggtgcagatttaggtgctggggctacgacaggcgcggcaggttcagctggggttggcgctggcggcacatccggcatggcaaaggttgccagcgcaggttgttccggacgcttacgttcagcgaactcttcttcagacggcagcgccatcgcttcttcatgcagcttcggcagcatgtagcttaaggtcggcgtttcttcccctttacgcacgcgcagcacgtggtagtgcggggtttccatctgatcgtttggcacaatcacgcagcgaacaccgtcctgacgcgtttcaatggcattcaccgcagaacgtttttcattcagcagataagaagcgattggcacaggaacaatggcgtgaacttcctgggtgttctctttcagcgcttcttcttcgatcagacgcagaatagagagcgacagcgattcgttgtcacgcacggtaccggtaccggagcagcgcgggcagacgtgatggctggattcacccagtgatgggctcaggcgctgacgggacatttccagcaggccaaagcgagaaatatggctgatttgaatacgcgcacggtcctgacgcaccgcttcacgcagacggttttctaccgcacgctggtggcgtactggcgtcatgtcgatgaagtcgataacaatcaggccgccgaggtcacgcaggcgcagctgacgagcaatctcatcggcagcttcgaggttagtgttaaacgcggtttcttcgatatcgccgccgcgggtcgcgcgtgcggagttgatgtcgatggccgttaacgcttcggtgctgtcgataacaatggaaccaccagacggcagacgaacttcacgctggaaggcggactcgatctgtgactcgatctggtagtggctgaacagcgggatctcgccggtgtacagtttgattttgctgctgaaatccgggcgacctaatgcagcgatatgctgacgtgccagttcgagcactttcgggttatcgataaggatttcgccgatgtcctgacgtaagtaatcgcggaatgcgcgaacgattacgttgctctcctgatgaatcaggaacggggccgggcggctttcagcggcttttttgatggcttcccagtgtttcagacggaagcttaaatcccattgcagcgcctcagcagatttgccgacgccagcggtgcgcacgataagccccatgccttccggcagttcaaggcttgccagtgcttcttttaattcggtacggtcgtcgccttcgatacggcgagaaatgccacccgcgcgcgggttgttcggcatcagaaccagatagctacccgccagactgataaaggtggttaatgccgcgcctttgttgccgcgctcttctttatcgatctgaacaatgacttcctgaccttcacgcaacacatctttaatgttgggacgaccatgagcactgtagttagcagggaaatattcgcgggcaatttcttttagtgggaggaaaccgtgacgttcagcgccgtaatcaacaaaagcagcttccagactcggttcaatgcgggtgattttacctttgtagatgtttgcctttttctgctcgtgccctggactttcgatatccaggtcatacagacgctgcccatctacaagggcaacgcgcaactcttcctgctgagttgcgttgattaacattcttttcatcgtaacttactcattattcttacattgacgactaagctgcgggcaaagtaacgcctttccgggtgtgaaccgatggcctcgtgtctagtcgcgtcgccaacctcacggttatcgtcagctcaaagaggcgcagagtgtcggttgcccgtttttcatgcggaaaaacagcgcaattatcaaagaaacagactgggtattactctccagaaatatttccatctaccggtaaggactgcaacccgcagcccgctaactgcctgaaagatcaatacgtcttacgccattgctgcgtggatgatcggtcgggcaaaatgggttattccgtaaaatttcttgttttaacaaggatggacacggaaacggcctcattattccactgcaagccttgttatagcaagatgacttttaccatttatcacccgcttactcacagttttttcacttcttgctggtgattggtttaataaccatcaataaagtgatcacgcagtgaagtaataaggtgcaaaagtaaatataagcatagaaaaatgagtggcgcgaatcctgttggctaattagaatcgccaaccatgaaaacagagactccatccgtaaaaattgttgctatcaccgctgacgaagcggggcaacgtatcgataactttttgcgtacccaattgaaaggcgtaccaaaaagtatgatttaccgtattttgcgtaaaggcgaagtgcgggtgaacaaaaaacgtattaagcctgaatataaactcgaagcgggtgatgaggtgcgtattccaccggttcgcgttgctgagcgggaagaagaggcggtttcgccacatctgcaaaaggtggcggcgctggcggacgtcatcttatatgaagatgatcacatcctggtgctgaataaaccttccggtacggcggtacatggcggcagtggtttaagcttcggcgttattgaaggtttgcgggcgttgcgcccggaagcgcggttccttgaactggttcatcgtcttgaccgggacacctcaggtgttttgctggtagcgaaaaaacgctcggcgttgcgttctctgcatgagcaattacgtgaaaaagggatgcaaaaagattacctggcgctggtgcgcggtcagtggcagtcgcatgtgaagagcgttcaagcaccgttactgaaaaatattctgcaaagcggcgaacgtatcgtgcgtgtgagtcaggaaggcaaaccgtcggaaacacgctttaaagtggaagaacgctatgcatttgccaccctggtgcgttgtagcccggtaacagggcgtactcaccagatccgtgtgcatacacaatatgcgggtcatccgattgcctttgacgatcgctacggtgaccgtgaatttgacaggcagctcactgaagcaggcacgggattaaatcgcctgttcctgcacgctgcagcgttgaagtttactcatccggggaccggtgaggtgatgcgtatcgaagctccgatggatgaaggtttgaagcgttgtttgcaaaagctgcgtaacgcgcgctaatacaagcatataaacctgataatgggcggttggcctgataaggcgtttacgccgcatcaggccgccagcaccgattgccggatgcgacgtaaccacatccggcgcaaaaaactatcccatcagcgggtttttcccttcccgacgtaacatctgacacagcgcgattagcggtaaaccaaccagcgtgttaggatcacgcccctctaaacgctcaaacagcgtaatgccaaatccttcactcttaaagctacccgcgcagtgcaggggatgctctttacgcacgtaattatcaatctccgcctcgctcaggtgacggaaaaggacgtcaaaaggctccacttctgtttgcagatgcccattcgccgaattaaacaacgccagtccagtatagaaggtgacgatattgccgctggctttgcgtaattgcagacgggcattttcttccgttaacggtttaccggtgatttcgccatcaagaacacatacctggtctgaaccaataattaaatgatccggataacgtgacgccagagattgcgctttttcttgtgccagtcgaagcaccaactgtcgcggtgattcgtcgctgcgtggggtttcgtcgacctctggtgctgcacattcaaaagagatttgcagtttttccagaagagcgcgacgccatggcgaggtggaggctaaaataagtttaggcatatttttttccatcagatatagcgtattgatgatagccattttaaactatgcgcttcgttttgcaggttgatgtttgttatcagcactgaacgaaaataaagcagtaacccgcaatgtgtgcgaattattggcaaaaggcaaccacaggctgcctttttctttgactctatgacgttacaaagttaatatgcgcgccctatgcaaaaggtaaaattacccctgactctcgatccggttcgtacggctcaaaaacgccttgattaccagggtatctatacccctgatcaggttgagcgcgtcgccgaatccgtagtcagtgtggacagtgatgtggaatgctccatgtcgttcgctatcgataaccaacgtctcgcagtgttaaacggcgatgcgaaggtgacggtaacgctcgagtgtcagcgttgcgggaagccgtttactcatcaggtctacacaacgtattgttttagtcctgtgcgttcagacgaacaggctgaagcactgccggaagcgtatgaaccgattgaggttaacgaattcggtgaaatcgatctgcttgcaatggttgaagatgaaatcatcctcgccttgccggtagttccggtgcatgattctgaacactgtgaagtgtccgaagcggacatggtctttggtgaactgcctgaagaagcgcaaaagccaaacccatttgccgtattagccagcttaaagcgtaagtaattggtgctccccgttggatcggggataaaccgtaattgaggagtaaggtccatggccgtacaacagaataaaccaacccgttccaaacgtggcatgcgtcgttcccatgacgcgctgaccgcagtcaccagcctgtctgtagacaaaacttctggtgaaaaacacctgcgtcaccacatcactgccgacggttactaccgcggccgcaaggtcatcgctaagtaatcacgcatctgcgtgatgaagcttagtgaggattttccccaggcaactggggaaagaccaaaccgggcggcgacgataccttgacacgtctaaccctggcgttagatgtcatgggaggggattttggcccttccgtgacagtgcctgcagcattgcaggcactgaattctaattcgcaactcactcttcttttagtcggcaatcccgacgccatcacgccattacttgctaaagctgactttgaacaacgttcgcgtctgcagattattcctgcgcagtcagttatcgccagtgatgcccggccttcgcaagctatccgcgccagtcgtgggagttcaatgcgcgtggccctggagctggtgaaagaaggtcgagcgcaagcctgtgtcagtgccggtaataccggggcgctgatggggctggcaaaattattactcaagcccctggaggggattgagcgtccggcgctggtgacggtattaccacatcagcaaaagggcaaaacggtggtccttgacttaggggccaacgtcgattgtgacagcacaatgctggtgcaatttgccattatgggctcagttctggctgaagaggtggtggaaattcccaatcctcgcgtggcgttgctcaatattggtgaagaagaagtaaagggtctcgacagtattcgggatgcctcagcggtgcttaaaacaatcccttctatcaattatatcggctatcttgaagccaatgagttgttaactggcaagacagatgtgctggtttgtgacggctttacaggaaatgtcacattaaagacgatggaaggtgttgtcaggatgttcctttctctgctgaaatctcagggtgaagggaaaaaacggtcgtggtggctactgttattaaagcgttggctacaaaagagcctgacgaggcgattcagtcacctcaaccccgaccagtataacggcgcctgtctgttaggattgcgcggcacggtgataaaaagtcatggtgcagccaatcagcgagcttttgcggtcgcgattgaacaggcagtgcaggcggtgcagcgacaagttcctcagcgaattgccgctcgcctggaatctgtatacccagctggttttgagctgctggacggtggcaaaagcggaactctgcggtagcaggacgctgccagcgaactcgcagtttgcaagtgacggtatataaccgaaaagtgactgagcgtacatgtatacgaagattattggtactggcagctatctgcccgaacaagtgcggacaaacgccgatttggaaaaaatggtggacacctctgacgagtggattgtcactcgtaccggtatccgcgaacgccacattgccgcgccaaacgaaaccgtttcaaccatgggctttgaagcggcgacacgcgcaattgagatggcgggcattgagaaagaccagattggcctgatcgttgtggcaacgacttctgctacgcacgctttcccgagcgcagcttgtcagattcaaagcatgttgggcattaaaggttgcccggcatttgacgttgcagcagcctgcgcaggtttcacctatgcattaagcgtagccgatcaatacgtgaaatctggggcggtgaagtatgctctggtcgtcggttccgatgtactggcgcgcacctgcgatccaaccgatcgtgggactattattatttttggcgatggcgcgggcgctgcggtgctggctgcctctgaagagccgggaatcatttccacccatctgcatgccgacggtagttatggtgaattgctgacgctgccaaacgccgaccgcgtgaatccagagaattcaattcatctgacgatggcgggcaacgaagtcttcaaggttgcggtaacggaactggcgcacatcgttgatgagacgctggcggcgaataatcttgaccgttctcaactggactggctggttccgcatcaggctaacctgcgtattatcagtgcaacggcgaaaaaactcggtatgtctatggataatgtcgtggtgacgctggatcgccacggtaatacctctgcggcctctgtcccgtgcgcgctggatgaagctgtacgcgacgggcgcattaagccggggcagttggttctgcttgaagcctttggcggtggattcacctggggctccgcgctggttcgtttctaggataaggattaaaacatgacgcaatttgcatttgtgttccctggacagggttctcaaaccgttggaatgctggctgatatggcggcgagctatccaattgtcgaagaaacgtttgctgaagcttctgcggcgctgggctacgacctgtgggcgctgacccagcaggggccagctgaagaactgaataaaacctggcaaactcagcctgcgctgttgactgcatctgttgcgctgtatcgcgtatggcagcagcagggcggtaaagcaccggcaatgatggccggtcacagcctgggggaatactccgcgctggtttgcgctggtgtgattgatttcgctgatgcggtgcgtctggttgagatgcgcggcaagttcatgcaagaagccgtaccggaaggcacgggcgctatggcggcaatcatcggtctggatgatgcgtctattgcgaaagcgtgtgaagaagctgcagaaggtcaggtcgtttctccggtaaactttaactctccgggacaggtggttattgccggtcataaagaagcggttgagcgtgctggcgctgcctgtaaagcggcgggcgcaaaacgcgcgctgccgttaccagtgagcgtaccgtctcactgtgcgctgatgaaaccagcagccgacaaactggcagtagaattagcgaaaatcacctttaacgcaccaacagttcctgttgtgaataacgttgatgtgaaatgcgaaaccaatggtgatgccatccgtgacgcactggtacgtcagttgtataacccggttcagtggacgaagtctgttgagtacatggcagcgcaaggcgtagaacatctctatgaagtcggcccgggcaaagtgcttactggcctgacgaaacgcattgtcgacaccctgaccgcctcggcgctgaacgaaccttcagcgatggcagcggcgctcgagctttaaaagaggaaaatcatgaattttgaaggaaaaatcgcactggtaaccggtgcaagccgcggaattggccgcgcaattgctgaaacgctcgcagcccgtggcgcgaaagttattggcactgcgaccagtgaaaatggcgctcaggcgatcagtgattatttaggtgccaacggcaaaggtctgatgttgaatgtgaccgacccggcatctatcgaatctgttctggaaaaaattcgcgcagaatttggtgaagtggatatcctggtcaataatgccggtatcactcgtgataacctgttaatgcgaatgaaagatgaagagtggaacgatattatcgaaaccaacctttcatctgttttccgtctgtcaaaagcggtaatgcgcgctatgatgaaaaagcgtcatggtcgtattatcactatcggttctgtggttggtaccatgggaaatggcggtcaggccaactacgctgcggcgaaagcgggcttgatcggcttcagtaaatcactggcgcgcgaagttgcgtcacgcggtattactgtaaacgttgttgctccgggctttattgaaacggacatgacacgtgcgctgagcgatgaccagcgtgcgggtatcctggcgcaggttcctgcgggtcgcctcggcggcgcacaggaaatcgccaacgcggttgcattcctggcatccgacgaagcagcttacatcacgggtgaaactttgcatgtgaacggcgggatgtacatggtctgaccgcgatttgcacaaaatgctcatgttgcgcgcagtctgcgtggttatgagtaataattagtgcaaaatgatttgcgttattggggggtaaggcctcaaaataacgtaaaatcgtggtaagacctgccgggatttagttgcaaatttttcaacattttatacactacgaaaaccatcgcgaaagcgagttttgataggaaatttaagagtatgagcactatcgaagaacgcgttaagaaaattatcggcgaacagctgggcgttaagcaggaagaagttaccaacaatgcttctttcgttgaagacctgggcgcggattctcttgacaccgttgagctggtaatggctctggaagaagagtttgatactgagattccggacgaagaagctgagaaaatcaccaccgttcaggctgccattgattacatcaacggccaccaggcgtaagtgaacatctccaggcggtcgttcgaccgcctgagttttatctttttgtcccactagaatcattttttccctccctggaggacaaacgtgtctaagcgtcgtgtagttgtgaccggactgggcatgttgtctcctgtcggcaataccgtagagtctacctggaaagctctgcttgccggtcagagtggcatcagcctaatcgaccatttcgatactagcgcctatgcaacgaaatttgctggcttagtaaaggattttaactgtgaggacattatctcgcgcaaagaacagcgcaagatggatgccttcattcaatatggaattgtcgctggcgttcaggccatgcaggattctggccttgaaataacggaagagaacgcaacccgcattggtgccgcaattggctccgggattggcggcctcggactgatcgaagaaaaccacacatctctgatgaacggtggtccacgtaagatcagcccattcttcgttccgtcaacgattgtgaacatggtggcaggtcatctgactatcatgtatggcctgcgtggcccgagcatctctatcgcgactgcctgtacttccggcgtgcacaacattggccatgctgcgcgtattatcgcgtatggcgatgctgacgtgatggttgcaggtggcgcagagaaagccagtacgccgctgggcgttggtggttttggcgcggcacgtgcattatctacccgcaatgataacccgcaagcggcgagccgcccgtgggataaagagcgtgatggtttcgtactgggcgatggtgccggtatgctggtacttgaagagtacgaacacgcgaaaaaacgcggtgcgaaaatttacgctgaactcgtcggctttggtatgagcagcgatgcttatcatatgacgtcaccgccagaaaatggcgcaggcgcagctctggcaatggcaaatgctctgcgtgatgcaggcattgaagcgagtcagattggctacgttaacgcgcacggtacttctacgccggctggcgataaagctgaagcgcaggcggtgaaagccatcttcggtgaagctgcaagccgtgtgttggtaagctccacgaaatctatgaccggtcacctgttaggtgcggcgggggcagtagagtctatctactccatcctggcgctgcgcgatcaggctgttccgccaaccatcaacctggataacccggatgaaggttgcgatctggatttcgtaccgcatgaagcacgtcaggtcagcggaatggaatacacgctgtgtaactccttcggcttcggtggcactaatggttctttgatctttaaaaagatctaagttgtcatttcccacccatataaaaggtccgcttgcgggccttttttcttagcttttattccgacttgttccgtagtgaacatgctgccacactaacaattctctgataaggagccggtatgttcttaattaacggttataagcaggaatcgctggcagtaagcgatcgggcaacgcagtttggtgatggttgttttaccactgccagagttatcgacggtaaagtcagtttgttatcggcgcatatccagcgactacaggatgcttgtcagcggttgatgatttcctgtgacttctggcctcagcttgaacaagagatgaaaacgctggcagcagaacagcaaaatggtgtactgaaagtcgtgatcagtcgcggtagtggcgggcgagggtacagcacattgaacagcggaccagcaacgcggattctctccgttacggcttatcctgcacattacgaccgtttgcgtaacgaggggatgacgttggtgctaagcccggtgcggctggggcgcaatcctcatcttgcaggtattaaacatcttaatcggcttgagcaagtattgattcgctctcatcttgagcagacaaacgctgatgaggcgctggtccttgacagcgaagggtgggttacggaatgctgtgcggctaatttgttctggcggaagggcaacgtagtttatacgccgcgactggatcaggcaggtgttaacggcattatgcgacaattctgtatccgtttgctggcacaatcctcttatcagcttgtcgaagtgcaagcttctctggaagaggcgttgcaggcagatgagatggttatttgtaatgcgttaatgccagtgatgcccgtacgtgcctgtggcgatgtctccttttcgtcagcaacgttatatgaatatttagccccactttgtgagcgcccgaattagtcatgaaaaaagtgttattgataatcttgttattgctggtggtactgggtatcgccgctggtgtgggcgtctggaaggttcgccatcttgccgacagcaaattgcttatcaaagaagagacgatatttaccctgaagccagggaccggacgtctggcgctcggtgaacagctttatgccgataagatcatcaatcgtccacgggtttttcaatggctgctgcgtatcgaaccggatctttctcactttaaagccgggacttaccgctttacaccgcagatgaccgtgcgcgagatgctgaaattgctggaaagcggtaaagaagcacagttccctctgcgagtggtagaagggatgcgtctgagcgattacctcaagcaattgcgtgaggccccgtatatcaagcatacgctgagcgatgataagtacgccaccgtagcgcaggcacttgaactggaaaacccggagtggattgaaggttggttctggccagacacctggatgtataccgccaataccaccgatgtcgcgttactcaagcgagcgcacaagaaaatggtgaaagcggtcgatagcgcctgggaagggcgtgcggacggtctgccttataaagataaaaaccagttggtgacgatggcatcaattatcgaaaaagaaaccgccgttgccagtgaacgcgataaggttgcctcagtatttatcaaccgtttacgcattggtatgcgcctgcagaccgacccgaccgtgatttacgggatgggagagcgttataatggcaaactttctcgtgcagacctggaaacgccgacagcgtataacacctataccattaccggtctgccgccaggtgcgatagcgacgccgggggcggattcgctgaaggctgctgcgcatccggcaaaaacgccgtatctctattttgtggccgatggtaaaggtggtcacacgtttaataccaatcttgccagccataacaagtctgtgcaggattatctgaaagtgcttaaggaaaaaaatgcgcagtaagtatatcgtcattgaggggctggaaggcgcaggcaaaactaccgcgcgtaatgtggtggttgagacgctcgagcaactgggtatccgcgacatggttttcactcgggaacctggcggtacgcaacttgccgaaaagttaagaagcctggtgctggatatcaaatcggtaggcgatgaagtcattaccgataaagccgaagttctgatgttttatgccgcgcgcgttcaactggtagaaacggtcatcaaaccagctctggctaacggcacctgggtgattggcgatcgccacgatctctccactcaggcgtatcagggcggcggacgtggtattgaccaacatatgctggcaacactgcgtgatgctgttctcggggattttcgccccgacttaacgctctatctcgatgttaccccggaagttggcttaaaacgcgcgcgtgcgcgcggcgagctggatcgtattgagcaagaatctttcgatttctttaatcgcacccgcgcccgctatctggaactggcagcacaagataaaagcattcataccattgatgccacccagccgctggaggccgtgatggatgcaatccgcactaccgtgacccactgggtgaaggagttggacgcatgagatggtatccatggttacgacctgatttcgaaaaactggtagccagctatcaggccggaagaggtcaccatgcgctactcattcaggcgttaccgggcatgggcgatgatgctttaatctacgccctgagccgttatttactctgccaacaaccgcagggccacaaaagttgcggtcactgtcgtggatgtcagttgatgcaggctggcacgcatcccgattactacaccctggctcccgaaaaaggaaaaaatacgctgggcgttgatgcggtacgtgaggtcaccgaaaagctgaatgagcacgcacgcttaggtggtgcgaaagtcgtttgggtaaccgatgctgccttactaaccgacgccgcggctaacgcattgctgaaaacgcttgaagagccaccagcagaaacctggtttttcctggctacccgcgagcctgaacgtttactggcaacattacgtagtcgttgtcggttacattaccttgcgccgccgccggaacagtacgccgtgacctggctttcacgcgaagtgacaatgtcacaggatgcattacttgccgcattgcgcttaagcgccggttcgcctggcgcggcactggcgttgtttcagggagataactggcaggctcgtgaaacattgtgtcaggcgttggcatatagcgtgccatcgggcgactggtattcgctgctagcggcccttaatcatgaacaagctccggcgcgtttacactggctggcaacgttgctgatggatgcgctaaaacgccatcatggtgctgcgcaggtgaccaatgttgatgtgccgggcctggtcgccgaactggcaaaccatctttctccctcgcgcctgcaggctatactgggggatgtttgccacattcgtgaacagttaatgtctgttacaggcatcaaccgcgagcttctcatcaccgatcttttactgcgtattgagcattacctgcaaccgggcgttgtgctaccggttcctcatctttaagagagacatcatgtttttagtcgactcacactgccatctcgatggtctggattatgaatctttgcataaggacgtggatgacgttctggcgaaagccgccgcacgcgatgtgaaattttgtctggcagtcgccacaacattaccgggttatttacatatgcgggatctggtaggcgaacgtgacaacgtcgtattttcttgtggcgtgcatccactcaaccagaatgatccctacgatgtagaagatttacgccgtctggcggcagaagagggtgttgtagcgctgggtgaaaccgggctggattattattacacgccggaaactaaagtacgtcagcaagagtccttcatccatcatatccagattggtcgtgaactgaacaagccggttatcgtccatacccgtgacgcccgtgccgatacgctggcaattctgcgcgaagaaaaagtgacggattgcggtggcgtactacactgttttacagaggacagagaaacggcgggtaaattactggatctcggattttacatctccttttccggcattgtgaccttccgtaatgcggagcaactgcgcgatgctgcgcgttatgtccccctggatcggttactggtggaaactgactcaccttaccttgcgccggtaccgcatcgaggaaaagagaatcaacctgcgatggttcgtgacgttgcagaatacatggctgtgttgaaaggtgttgccgttgaagaactggcgcaggtaaccaccgataacttcgcccgtctgtttcacatcgacgcttcccgccttcaatccatccgttgaatgagtttttttaaagctcgtaattaatggctaaaacgagtaaagttcaccgccgaaaattgggcggtgaataaccacgtttgaaatattgtgacatatgttttgtcaaaatgtgcaacttctccaatgatctgaagttgaaacgtgatagccgtcaaacaaattggcactgaattattttactctgtgtaataaataaagggcgcttagatgccctgtacacggcgaggctctccccccttgccacgcgtgagaacgtaaaaaaagcacccatactcaggagcactctcaattatgtttaagaatgcatttgctaacctgcaaaaggtcggtaaatcgctgatgctgccggtatccgtactgcctatcgcaggtattctgctgggcgtcggttccgcgaatttcagctggctgcccgccgttgtatcgcatgttatggcagaagcaggcggttccgtctttgcaaacatgccactgatttttgcgatcggtgtcgccctcggctttaccaataacgatggcgtatccgcgctggccgcagttgttgcctatggcatcatggttaaaaccatggccgtggttgcgccactggtactgcatttacctgctgaagaaatcgcctctaaacacctggcggatactggcgtactcggagggattatctccggtgcgatcgcagcgtacatgtttaaccgtttctaccgtattaagctgcctgagtatcttggcttctttgccggtaaacgctttgtgccgatcatttctggcctggctgccatctttactggcgttgtgctgtccttcatttggccgccgattggttctgcaatccagaccttctctcagtgggctgcttaccagaacccggtagttgcgtttggcatttacggtttcatcgaacgttgcctggtaccgtttggtctgcaccacatctggaacgtacctttccagatgcagattggtgaatacaccaacgcagcaggtcaggttttccacggcgacattccgcgttatatggcgggtgacccgactgcgggtaaactgtctggtggcttcctgttcaaaatgtacggtctgccagctgccgcaattgctatctggcactctgctaaaccagaaaaccgcgcgaaagtgggcggtattatgatctccgcggcgctgacctcgttcctgaccggtatcaccgagccgatcgagttctccttcatgttcgttgcgccgatcctgtacatcatccacgcgattctggcaggcctggcattcccaatctgtattcttctggggatgcgtgacggtacgtcgttctcgcacggtctgatcgacttcatcgttctgtctggtaacagcagcaaactgtggctgttcccgatcgtcggtatcggttatgcgattgtttactacaccatcttccgcgtgctgattaaagcactggatctgaaaacgccgggtcgtgaagacgcgactgaagatgcaaaagcgacaggtaccagcgaaatggcaccggctctggttgctgcatttggtggtaaagaaaacattactaacctcgacgcatgtattacccgtctgcgcgtcagcgttgctgatgtgtctaaagtggatcaggccggcctgaagaaactgggcgcagcgggcgtagtggttgctggttctggtgttcaggcgattttcggtactaaatccgataacctgaaaaccgagatggatgagtacatccgtaaccactaatccgtaagacgttggggagactaaggcagccagatggctgccttttttacaggtgttattcagaattgatacgtgccggtaatgctgaaattacgcggtgtgccgtagacgatagaaccttccacgttggtatcgtaggttttgtcgaacaggttattgacgttcccctgtaacgagaagtttttcgtcacctggtagcgggtgaagagatccaccagcgcgtagctaccttgctcggcgcggaaggtgccatacggcgtcacggtgtcggtatacacgcgattttgccagttaacaccaccgccgaccgtcaactctggcatgacaggcaaccgatagctggtgaacattttaaccgtggtgcgtggcagattaggattaacggcgtttccttcgttatcctctgcaatatagcgcgttgcgccaaatgtcagctgccagttgtcggtaattgcgccgttgagttcaaattccacccctttactgactgtcccatccaccgctttataggcggtttcgccgttgctgccggggataggtgtaccggtggactgagcgacattatcctgctcaatacggaagatggctaacgtggtggtcagacggctattcatccagtccgatttcagacccagctcgtagttgttaccggtgattggagccagatatttgcctgaactgtcacgatcattttgcggctggaaaatagaggtatagctggcgtaggtcgaccagttgtcattgatgtcaaacaccagaccagcgtaaggcgtggtgtggtttttctccatgctgtaagtcagcgtatcaacccgccagttggtataacgtgcgccgaggatcagatgcagcggatcggcaagggtgacacgagtggcagcatataacgatttcatatgtgtggtatcgtcctgcgccaggctctgtggtgaccagtcggtttgtgggaaattgccattaaagttgtagaaactgccaatttcatccgggaagatgttggcccatgaactgaagtaacgattgttttgtttgctgtaactgccaccaaacattagattgtgctgacgaccaaacaattcataactaccgtcagcgaacaaatccagcgcatcaactttacgtttgccactgttccaaccggtgccgccgacataatcaaagccaggtccataattactgtatggcccaaccagcataccatccgctttgtttacataggcatcgacatacatcattttgctgtcaaattcgacttcagagtgggtggcattcagtgtcgcttgccaggtatcagcaaactgctgcttcagggtcataaagaccttgttgatctctttatcgttgtacgcccagtcaggtgcggtactgcgtgcgcgatcgtaactgttgctgctgccatcagtattccagcgcggtaaaccgccccaggtagggctattaacatcaatgcgctgatattcgtaaccggctgaaagcgtcgtaagatcgcctaaatcagcatcgacaatgcccgagaagaaggtcttttcactgttgtagcggtccagccatgagtcgttattctggtagccgccgacaattcgcgcgcggattttaccgtcttcggtgagtgggctttgtaaatccgccacataccgttctttgttccagctaccgtattccgccgagacatcgcctttaaattcacgactggtcgcgtgttttcgaaccatattaattgccgcagatggattacccgtcccggtcatgagtcctgtcgcgccacgcactacttctacgcgttcaaagagtgccatatcagaaagtgcgtcgcccagattccagcgcgattcaaaataggtggggataccatcaaccatatagttatcgatctggaatccgcgggaataataaagagcacgatcggaatccgcctgacttttgctgatccccagcgtgttttccatcacttcgcccagcgtttgtaactgctgatcttccatccgctgctggctaacaatagtgaccgactgaggaatatcacgttgagtcatctgcattttggtacccgcagaggtagacgttacgctgtaatcattttcgccatcatctggagctgtggctgaaccctcaacaatcaccgtttcttcagtggctggtgcagcaaaagcggcagaaggtaatagtgccagtgctatgcaaccggcaagtagtgacggtttggtgatggcttgatattgattatccctgttaaattgtgttgaaagcatttgaaatctcttggtttatgttgtcgtcaggctcatgccggaggagggtgatgagcgattatatttagtgtgcgaataattttgtttgtaaatgcaaatgagaaatatacgcattcatatttgtcatgtaaaccaaacagagaatgtcttttcagcgcattcgcaggcagaaatgggaataatggcgatatatacggcagcaaaacgattttttgcttaagaaatcgtgagttaaggttgaaagagcaggtttaactcgaccatactctatactcgcagtgtggcgcggcgtagcatggcgcaacgcatggctatttgaaaaaggaaaatgtcgtggcagaagaaactatattcagcaaaattattcgtcgtgagatcccctccgatatcgtctaccaggatgatctggtaacggcgtttcgcgatatttcgccgcaagcgccaacgcatattctgatcattccgaatatcctcattccgactgtgaacgacgtctcagctgagcatgagcaggcgctgggacgcatgatcaccgtagcggcaaaaattgctgagcaagaaggtattgccgaagatggctatcgtctgatcatgaataccaaccgccatggcggacaagaggtttaccacatccatatgcacttgttgggtggccgtccgctgggaccaatgctggcgcataaaggtctgtaacgatgagaaaaggatgctttgggctggtgtctctggtgttgttactgctggtgggctgtcgttcacatccggaaattccggtgaatgatgagcaatcgctggtgatggagtcatctttattggctgcgggcatcagtgcagaaaagcccttcctttcgacgtctgatattcaaccttcagcatcctcaacgctttataacgaaaggcaagaacccgttaccgttcattatcgtttttactggtatgacgccagagggctggagatgcatcctctggaaaggccacgcagcgttaccattcccgcacattcggcggtaacgctgtacggcagcgccaattttctgggggcgcacaaagtcagactttatctatatttgtaaggggtgaatcttgatgacaaaaatgagtcgctacgccttgattaccgcgctggcgatgtttctcgccgggtgtgtggggcaacgtgaacctgcaccggtagaagaagtgaaaccagcgccggaacaaccagccgagccacaacagcctgtccccacagtgccctcggtgccgacgatcccgcagcagccaggcccaattgagcacgaagatcaaactgcaccgcctgcgccgcatattcgccattatgactggaatggcgcaatgcagccgatggtcagtaagatgcttggggctgacggggtgactgcgggtagcgtcctgctggttgatagcgttaacaaccgtactaacggttcgctgaatgccgcagaagcgaccgaaacgctgcgaaatgcgctggctaataacgggaaatttaccctggtttccgcccagcaactgtcgatggcgaagcaacagttaggtttgtcgccgcaggacagtttaggcacccgtagtaaagccataggcattgcccgcaatgtcggcgctcattacgtgctgtactccagcgcctctggcaacgttaacgctccgaccctacaaatgcagctgatgctggtgcagacgggcgaaattatctggtcaggtaaaggtgccgtttcgcagcaataatcccatcacgcgcgacgaattgctgtcgcgctttttcccgcagtatcatcccgtcacgacgtttaatagtgggcttagtggcgggagttttctcattgaacatcagggccagcgttttgttgtgcgtcagccgcacgatcctgatgcgccgcagtccgcgttcttgcgccagtatcgggctttatcacaactacccgcatgcattgcaccgaagccgcatttatatctccgtgactggatggtagtcgactatctgcccggcgcggtaaaaacgtatttgccggataccaacgaactggcaggcttgctgtattatctacatcaacaaccacgttttggctggcgaataacgctgttgccgttactggaactgtactggcagcaaagcgatccggcgcggcggacagtgggttggctgcgaatgttaaaacgtctgcgcaaagcgcgggaaccacggcctttacgcttaagtccattgcatatggatgtccacgccggaaatttagtgcatagcgcgtcagggttaaaactcatcgactgggagtatgccggagatggtgatatcgcgctggaactggcggcggtgtgggtggaaaatactgaacagcaccggcaattggtcaatgactatgccactcgcgcgaagatttatccggcgcaattatggcgtcaggtcaggcgatggtttccctggctgctgatgctcaaagcagggtggtttgagtaccgctggcgacaaaccggcgatcaacaatttatcaggctggccgatgacacctggcggcagctattaataaaacaataaggagagcagtgtgggtccagtaatgttggatgtcgaaggttacgaactggacgcggaagagcgtgaaatactggcgcatccgctggtgggagggctgattctctttacgcgtaactatcatgatcctgcccagttacgtgaactggtgcgccagatccgcgcagcttcgcgcaatcgtctggtggtggcggttgatcaggaaggtggacgcgtgcagcgttttcgtgaaggttttacccgcttgccagcggcgcaatcattcgctgcgctgtcaggaatggaagagggtggcaaactggcgcaggaggcaggttggttgatggccagcgaaatgatcgctatggatattgatatcagctttgcgcctgtgctggatgtcgggcatatcagcgcggcgattggcgagcgttcttatcatgccgatccacaaaaagccctggcaattgccagccggtttattgatggtatgcatgaagccggaatgaaaacgaccgggaaacacttcccaggacacggtgcagtaacggcagactcacacaaagaaacaccgtgcgatccacgtccacaagcggagattcgcgctaaagatatgtcggtcttcagttccttaatccgcgaaaataaactcgacgccattatgcctgcgcatgtgatctacagtgatgttgatccgcgtccggcgagcggttctccctactggctgaaaaccgttttgcgtcaggaactgggttttgacggcgtgattttctctgacgatttatcgatggaaggtgccgcgattatgggcagttatgccgaacgcgggcaggcttcactggatgcgggttgcgatatgatcctggtctgcaataatcgtaaaggggccgtcagcgtgttagataatctgtcaccgatcaaggcagaacgtgttacacgtttgtatcataaaggttcattttcgcgacaggaactgatggactcggctcgctggaaagcgatcagcacccgtctgaatcagttacatgaacgctggcaggaagagaaagcaggtcactaaccctggcttatgtgaggaagcgatgattatctatttacacggttttgactctaacagtccgggtaaccacgagaaagtcttacaattgcagtttattgacccggatgtacgcttgataagctacagtacgcggcatccgaaacatgatatgcagcatctgcttaaagaagtggacaaaatgttgcaactgaacgttgacgagcgtccgctaatttgcggcgttggcttgggcggatactgggcggaacggattggttttctttgcgacatccgccaggtgatcttcaaccctaatttgttcccttatgagaacatggaaggcaagattgatcgcccggaagagtatgccgatattgccactaagtgtgtgaccaacttccgtgagaagaatcgcgatcgttgcctggtgattttgtcgcgtaatgatgaagcgcttaacagccagcggacatctgaagagttgcatcattattacgagattgtctgggacgaagagcagacgcacaaattcaagaatatctccccgcatttacagcgcattaaagcgttcaaaaccctcgggtaaatgccctcgtcgcatcaggtaaccttgccggtacctgatgcgctccgaattctgtgggtcggataaggcgtccacgccgcatccgacagtcgagcatcaatgcctgatgcgcttcttatcaggcctaccgaacgctctgcatacacccctcactctatatcactctcacaaattcgctcaaataataaacaataaactctgttttttgatctcacccggtaaagtcgcctatcttttcagcaacaaaacttgattaacatcaattttggtatgaccaatgcaccattcatgttattctcaatagcgaagaacattttcattgctgtaacctgttgttaattaagagctatgttaataaccattaattaacaattggttaataaatttaagggggtcacgttgactacgccattgaaaaagattgtgattgtcggcggcggtgctggtgggctggaaatggcaacacagctggggcataagctgggacgcaagaaaaaagccaaaattacgctggtcgatcgtaaccacagccacctgtggaaaccgctgctgcacgaagtggcgactggctcgcttgatgaaggcgtcgatgcgttgagctatctggcccatgcgcgcaatcatggtttccagttccagctgggttccgtcattgatattgatcgtgaagcgaaaacaatcactattgcagaactgcgcgacgagaaaggtgaactgctggttccggaacgtaaaatcgcctatgacacactggtaatggcgctgggtagcacctctaacgatttcaatacaccaggtgtcaaagagaactgcattttcctcgataacccgcaccaggcgcgtcgcttccaccaggagatgctgaatctgttcctgaaatactccgccaacctgggcgcgaatggcaaagtgaacattgcgattgtcggcggcggcgcgacgggtgtagaactctccgctgaattgcacaacgcggtcaagcaactgcacagctacggttacaaaggcctgaccaacgaagccctgaacgtaacgctggtagaagcgggagaacgtattttgcctgcgttaccgccacgtatctctgctgcggcccacaacgagctaacgaaacttggcgttcgcgtgctgacgcaaaccatggtcaccagtgctgatgaaggcggcctgcacactaaagatggcgaatatattgaggcggatctgatggtatgggcagccgggatcaaagcgccagacttcctgaaagatatcggtggtcttgaaactaaccgtatcaaccagctggtggtggaaccgacgctgcaaaccacccgcgatccagacatttacgctattggcgactgcgcgtcatgcccgcgtccggaagggggctttgttccgccgcgtgctcaggctgcacaccagatggcgacctgcgcaatgaacaatattctggcgcagataaacggtaagccgctgaaaaattatcagtataaagatcatggttcactggtatcgctgtcgaacttctccaccgttggtagcctgatgggtaacctgacgcgcggctcaatgatgattgaaggacgaattgcgcgctttgtatatatctcgctataccgaatgcatcagattgcgctgcatggttactttaaaaccggattaatgatgctggtggggagtattaaccgcgttatccgtccgcgtttgaagttgcattaatcgacgtacactggcggatgtggcataaacgcctcatccgccctggacaaatggtacgagcggtaggcctgataagacgcgttaagcgtcgcatcaggcattccttcagactcctccgaatcattaagtatttccagccattcccgcgcttttcatcttctgtctgatagctgcttttctccttcgcttgcatgattggcataactgcaaagaaggaggtgttcccgtgaataaatcaatgttggcgggtatcgggattggtgtcgcagctgcgctgggcgtagcggcagtggccagtctgaacgtgtttgaacgtggcccgcaatacgctcaggttgtttctgcaaccccaatcaaggaaacggttaaaacaccgcgtcaggagtgtcgcaacgtcacagtgacccatcgtcgaccggtgcaggatgaaaatcgcattaccgggtcggtgctcggcgctgttgctggcggcgtgatagggcatcagtttggcggtggtcgcggtaaagatgtcgccactgttgtgggggcgctgggtggtggatatgccggtaaccagatccagggctctctccaggaaagcgatacttacacgactacgcaacagcgttgtaaaacggtgtatgacaagtcagaaaaaatgctcggttatgatgtgacctataagattggcgatcagcagggcaaaatccgcatggaccgcgatccgggtacgcagatcccgctagatagtaatgggcaactgattttgaataacaaagtataacaaggctgtactctgcaatttggcccctcattcgctcaggctgaggggctttttttgcgacttatttcaccagttcgggccataaacgcaaagtcgttccggcaatctgcattagtttttccagcgatgcaccttcgcgtgcgctgatcgacatcccctgaataatacaattaaggaattctgccagatgtgtcacgtcacagtgggtcgggatttccccgcgcgcttgtcgttgacataaaaactgctgcaaagtgcgctcttgcatcgcatggcgtgatttcaacgtattggcgatatctcctgaatctggggagagggtggtgcagttgttgatcatgaagcagcctgtcggggtgtctttgctggtaaagcagttggcgatggcagcaaaatagtcagccagcgcagactccacgcttttctcttcacaaaacagctgtgcttcatgcttagcggcaaaacgatcgatatagcggtcgagaacggcacgaaataacccctctttgttggtaaattccgcgtatagcgtgggcgctttggctccggtcgcttcgacgaggtccgcaagagaagtcgcttcataaccgtgttgccagaacaatttcatggccttatcaagcgcggcatccctgtcgaacacttttgggcggccacggcttttttttacacattgtgttgagtcagttgccatgatgccgttgtacctggtgactgtgaatgaaaggttattataaaaataatcacctccgttcaccagtccagatcccataaaaataattgctttctatttaactgaaatttaaagatttttaaattaattaatgattgttataaaaaatatcttgtatgtgatccagatcacatctatcatttagttatcgatcgttaagtaattgcttgcgacgtcattcatctgcataaggccactattatgaaaaacgtaaaaaccctcatcgctgcggcgattttaagctccatgtcatttgccagctttgcggcggtcgaagttcagtcaacgccagaaggccaacaaaaagtcggtacaatcagtgctaacgcggggacaaatctgggatcgctggaagagcagctggcgcaaaaagcggatgagatgggcgcaaaatctttccgtattacttctgtaaccggtccgaataccctccatggaacagcagtaatttataaataagcattaaccctcattaatgcctgctactgctgattttttccccgcgacatgccgtgtcgcggggattttttttatccaggatttacagagtttgtgggctcacttgatgacggcggacatccaccggcatcccggaacggacatccatcacatgttgcatcacttcagcgtcagtttgtgctgcatctttaaatgattgcattgcgctattcagcgtaattggcagcagctgcggatcgtcatcaatcttctctgacagcggctgatgtacttcaaccagacgcgcaccgtttggttcggcagagacttttatcggagtgttgatgatattcactttggtgcctggggtgacctggctaaagagtgttttgatatcgtcatcccgcagacgaatacagccagaacttacccgcatgccaatgccaaaatcggcgttcgtaccatgaagcaaataaacgccgccataggccgccagacgaatcgcatgatggcccattgggttatccggtccagccggcactaccgcaggcaactcaattccctgtgctttataacgggcgcggatgtttgccgttggcgtccaggttgggtttgcacgtttgtctgaaacggtggtcaccattgtcggtgtcagcgtgtcaccacctaactgaccaatacctattggatacacggttaccgaatttttacccggcgggtagtaatagagacgcagctccgcaatgttgatcacaatgccttcgcgcggcgcgtctggaagtagggtttgcaacgggatcgttaacacgctgcccgcgcgcggtacgtaaggatcaacgccgaggttagcctgtaacagagcgagaaagccgacgttatattttttggcgatggcttccagagaaccaccgtcattttccaccacatgaaatttgttttcgccaaccagacgactgcccgctggcggcagcggccaggtgttggcttttgccggtagcgccagcgccacggcagcggcgaacgtaaaaaaagttagccagcgagaaaaacgcgttttgatcatcaccaaaaatccataataaatataaggttattgtaataaacagataagcctgaattatggatggtgacagtgtcggatagtgcagggaagtgcaaagaatttgtaaatgttgcagatgggggcgcagaaacgcccccgatttaccattaagcgatcgcgttctcttccagttcacgcataaactggcgtacccattcgatacgcgttttccgctcactcaaatcctgaataaatttcaggcgcgtcggaccatcaaggcggtaatgctgcggctgtttttgcagcaaaccaatcaaccaggccggattaacgtgattcttctcggcaaattcgatcaccccgcctttctcattaccttccagcttcctgatccccagtttctgcgcttgctggcgcagacgggcaatatccagcagggtacgcgccggatccggcagcaggccgaagcgatcgataagctcgactttgatctcttccagttcgttttccgttttggcgctggcaatacgtttgtagaacgacagacgcgtgttcacgtcagggatgaaatcatctggcaatagcgacggcatccgcagctcgacttctgtttgctggctggtgagatcttccagcgacggctcgcgtccggctttcagtgcatcgacggcgttttccagcaactccatatacagcgagaaaccgatggtttccattgagccgctttgttcttcgccaagcagttcacccgcgccgcgaatctccagatcgtgcgttgccagcgcaaaacctgccccgagatcttccagcgaggcaatcgcttcaagacgtttttgtgcatcggtagtcatcgcttttggatgcggtgtcagcaaccatgcatatgcctgatgatgcgaacgtccgacgcgaccgcgtaactggtgcagctgcgccagaccgaagtgatccgcccgttcaatgataatggtgttggctgtcgggatgtcgatcccggtttcgataatggtggtacaaaccagcacgttgaaacgttgatgatggaaatcattcatcacccgttccagttcgcgctcgcgcatctgcccgtgaccgatggcgatccgcgcttctggcaccagttctgccagccgttcggcggctttctgaatgttttccacatcattgtagagataataaacctgtcctccgcgcaaaatttcacgcaggatcgcctcccggaccaccaggctgtcatactcacggacaaaggttttaactgccagacgacgggcgggcggcgtggcgataatcgacaggtcacgcattccgctcattgccatattcagcgtacgtgggatcggcgttgcagtaagcgtcagaatatccacgttcgcgcgcatcgctttaatgcgctctttatgacgcaccccgaagcggtgttcttcatcgacaatcagcaggcctaaatctttaaacttgacgtcactttgcagcagtttgtgcgtaccgatcagaatatcgattttcccttccgccacttccgcaaggatttgcgtctgctctttggcgctgcggaaacgggagatcatttcgatacggaccggccagttggcgaaacggtcgcggaagttgtcgtaatgctgctgcgcgagaagggtggtaggcaccagcaccgctacctgcttgtggttatctactgccaggaaagcggcgcgcattgccacttctgttttaccaaagccaacatcgccgcacaccagacgatccattgccagtggctgacacatgtcgctaagcaccgcattaatggcttgagcctgatccggcgtggtttcaaacgggaagctgtcgcagaacaactgatactgctcacgatcgtgtttaaacgcgaagccctctttggcggcgcgttgcgcgtagatatccagcaattccgccgccacatcacgcactttttccgccgctttctgccgcgcgcgtgaccacgcatcaccgccaagtttatgcagcggggcgttttcttccgcgccacctgcgtaacggctaatcagatgcagtgacgacaccggaacatacagtttggcgtcgttggcataggtgagcatcaggtactcgccggtaatgccgcccgcttccagcgtggtcattccggcatagcgaccgacgccgtgctccagatggaccaccggctggccaatatgcagctccgcaaggttacggatcagtgtatcggggttgatggtgcggcgagaatcctgacgacggcgggcaacacgttcaccgagcagatcgctttcgcaaatcagcgctaggttacgcaccttatcgacaaaaccatgttcggcagcgccaatcatcagataacgcccacggtcgctggcttcatcaagacgcataatgcgttgcggagcaattttaattcgtgcgagcagttcacccagcgcttcacggcgaccttcactttctaccgagaacaccaccggaccgtcgaaagactcgaggaacttacgcagcgcatccagcggcgctttttgttgtgcctgaacggccaggtctggcagcttctcgaagcctaaattggcattcgctgcttttgtcggtaaatgttcagtttttagctgcacccggggccagtttttcagctctgagaagagctcgtccacccgcagccagagcgattgtggtggcaaaagtgggcgcattgggtcgacgccgcgattctcaaaacgcgccagcgtgtcagcctggaaacgttcggcactgttttccagatcgccagtattcaccagcaaggtattggcagggaaataactgaacagcggcggcagcggctcgctgaagaacagtggctgccagtactcgatcccggcaggcaatgtgcctttactcacttgctggtaaatatgttctggatcgcgcttcacttcgaaggtatcgcgccactggctgcggaacagttcaattgccgctttatcggtcgggaattcgtgcgcgggcagcaggttgatcgcttctacttcctccagcgtgcgctggctgtcgacgtcaaacacccgcaggctgtcgatttcatcatcaaagaaatcaagacgataaggcagctcactccccatcgggaagagatctagcaacgcgccgcgcgtggcgtattcgccgtgctccatcacctggtcaacatggcgataacctgcgctgtccagttgggttcgtaatgcatctcgtgacaggcgctgaccttttttcatcaccagcgcatgaccgtggagaaaactgtgtgggcaaacgcgctgcataagcgtattcaccggaacaatcagtacgccacgctgcatcgtcggtagctggtaaagggtggaaaggcgcgaggagataatgtcctgatgaggcgaaaaactgtcgtagggaagagtttcccagtccgccagattcatcaccatttgatcggtaaactggctgatttcatcatgcaaacgcagagcattttgcatatctggtgcaatgagtaccaccggaccggcgtgacgttcggcaatttccgctaccagcgtcgcacaggcagcgccggttaactcgcccagcagacgctgctcacccgctttgacgggcagcgtataacgatattgttcaggcataacggttgtcagattctcgttaggatatgcctcaacatatgggggcatatctctgataagcaatgctgttcattatccgtaatcgacatggtttagcaaattgaatcgctccggttggggcgatggcttagcgggagtaactgacggcagcgggcagtgaaggcggggagaacaacagatcgctgaatgcgcgccgtgaaagttttcttaccagcaagcccgcaacagtacagatgaacaaactgacaaagggataaaccagcaggagtgtcagttcgacttgcggcgaccagcgtgctgcgttcatttgcgcaagcagagttaagctgaatatttcaaccagaatgcgatgggtggtgtagatagcaatggtgttggagccaatcacattcagcaggctggtggagcgcataccgaatcgttgctcgtattgataaaacagcttcatgatcaccacaatcgataccagcgacaacagcagcgagatagtaaacaaccaggcagcaaccgccagaacagccagcaaagaagccatcagcagatggcggcgcaacggcacctctttaacacaggtcattattgttgcgccaaaccatgcgccaaggctgtaataaggcaaattgcggatcacactgttcattccccaccacggcgtgggaacgaaattaaccgccacactcagcagtacaaacaaggcgaatagtggcagcgccagacggctaaaaattttacatatcacgaaatagacaattaacgcatacagataccacaagctggtgctggcggtgatcatcccgtgcaggaactcaccggtggaatcggcatacgcggcactggaggcattgcttaaatcgcgctcaggtgccagccactggttcagcgcacttaacgccagccactgcaccacgccccaaagcgccagcacccagaagatgttccagatgcgtttatcgagacaatttccccacggtacgctgtcgatatagcggcgaatcaaatagccggatataaagaaaaaaaccggcatacgaaagggtgcaaggtaaagattgaaatagatccagcatttgctcaggacttccgataacggatgctgaaaagtggtcagatgcggataaaaggtaatgaccgagtgataaatcaccaccagacaaatacataaccctttgatctggttaatccatagctctttttgtttcatcaggacaacacgctcttttttaatttacatgcggttgatcctgcgggttatgacccgaggtgtaatgggtatctgtctgtattggatgatttttcagattaagatcaggcggcaagattgatgataaaacatggcaatttagccgattgatttacgggggcttttcagattagccctgacgatcacttacagttcagacgtttacccatcttgctttcgcttatatactcgtgtctttgctacagcaaccagacggatttcatgtaccaacctgtcgctctatttattggcctgcgttacatgcgtgggcgtgcagcggatcgcttcggtcgtttcgtctcctggctttctaccatcggcattaccctcggggtgatggcgctggtcacagtattgtcagtgatgaacggctttgagcgcgagctgcaaaacaacatccttggcctgatgccacaggcaattctctcttctgagcatggctctcttaacccgcagcaactcccggaaacggcagtcaaactggacggcgttaatcgcgtcgcacctattactaccggtgatgtggtactgcaaagcgcgcgcagcgtggcggtcggggtgatgctgggtatcgatccggcgcaaaaagatccactaacgccgtatctggtcaatgtgaaacaaactgacctcgagccggggaaatataatgtcatcctcggtgaacagcttgcctcacagctaggcgttaatcgcggtgatcaaatccgcgtgatggtgccatctgccagccagttcacgccgatggggcgtattccaagtcagcgcctgttcaatgtgattggcactttcgccgccaacagtgaagtcgatggctatgaaatgctggtgaatattgaggatgcctcacgcctgatgcgttatccggcaggcaatattaccggctggcgtttgtggctggatgagccgctgaaagttgactctttaagtcagcaaaaactgcctgaaggcagcaaatggcaggactggcgtgaccgtaaaggcgagctgttccaggccgtacgcatggaaaaaaatatgatgggcttactgctgagcctgattgtcgccgttgcggcgtttaacattattacctcactagggctgatggtaatggagaagcagggcgaagtagcgatcctgcaaacgcaaggcttaactccgcgacaaatcatgatggtctttatggtgcaaggggccagcgccgggattatcggtgcgatcctcggtgcggcgcttggcgcactgcttgccagccagttaaataatctgatgccgataatcggcgtcctgcttgatggcgcggcgctgccggtggctatcgaacctttacaggtcattgttattgcgctggtggcgatggctatcgcgctgctgtctacgctttacccttcatggcgcgctgccgccacacaacccgctgaggctttacgttatgaataagatcctgttgcaatgcgacaacctgtgcaaacgctatcaggaaggcagtgtgcaaaccgatgtactgcacaatgtcagtttcagcgtgggcgaaggtgaaatgatggcgatcgtcggtagctctggttccggtaaaagcaccttgctgcacttgttgggcgggctggatacgccaacctccggcgatgtgatctttaacggtcaaccgatgagcaaactgtcttcggcggcgaaagcagagctgcgcaaccagaagctgggctttatttatcagtttcaccatctgctgccggattttaccgccctggaaaacgtggctatgccgctgctgattggcaagaaaaagcccgctgaaatcaacagccgtgcgctggagatgttaaaagcggtggggctggagcatcgtgcgaatcaccgtccatctgaactttctggcggcgaacgccagcgtgtggcgattgcccgtgcgctggtgaataacccgcgcctggtactggcggatgaacctaccggtaaccttgacgcgcgtaacgccgacagcatcttccagttgcttggggaattgaatcgcttgcagggcaccgctttcctggtggtcactcacgacctgcaactggcgaaacgtatgagccgccaactggaaatgcgtgatggtcgtctgacggcggaactgagcctgatgggggcggagtaatggcgatgcctttatcgttattaattggcctgcgttttagtcgcggacggcggcgcggcggcatggtgtcgctgatctctgtcatttctaccattggtattgccctcggcgtggcggtattgatcgtcggcttaagcgcgatgaacggctttgaacgcgaactgaataaccgcattctggcggtggtgccgcatggtgaaatcgaagcggtaaatcagccatggactaactggcaggaagcactggataacgtgcagaaagtgccgggtattgccgccgctgcgccgtatatcaatttcaccggactggtagaaagtggtgccaatctgcgcgcaatccaggtgaagggcgttaacccacaacaggaacagcatctgagcgcattaccctcgtttgttcagggggatgcctggcgcaattttaaagcgggcgaacagcaaattatcatcggcaaaggcgtggcggatgcgctgaaagtgaagcagggcgattgggtgtcgatcatgatccccaactcgaatcccgagcataaactgatgcagccaaaacgtgtgcgtttgcacattgccggtattttgcagttgagtggtcaactcgatcacagttttgccatgatcccgctggcggatgcccaacaatatcttgatatgggttccagcgtgtcaggtattgcccttaaaatgacggatgttttcaacgccaataagctggtacgcgatgcgggtgaagtgaccaacagctatgtttatattaaaagttggattggtacttacggctatatgtatcgcgatatccagatgatccgcgccattatgtatctggcgatggtactggtgattggcgtggcctgtttcaacatcgtctccaccttagtgatggcggtgaaagacaagagtggcgatatcgcagtattaagaacgctgggggcgaaagatggtttaattcgcgccatctttgtctggtatggattgctggcagggctgttcggcagcctgtgtggtgtgattatcggcgtggtggtttcactgcaacttaccccgattattgagtggattgaaaagttgatcggtcatcagttcctctccagcgatatctattttattgatttcctgccatcggaattgcactggctggacgtcttctacgtactggtcacagcattgttgctgagtcttttggcaagttggtatccggcgcggcgcgccagtaatattgaccctgcgcgagtccttagcggccagtaaaggcagtacattaaaacaaggagcggcaatgtattacgggtttgatattggtggaacaaaaattgcgcttggcgtgtttgatagcggtcggcagttgcagtgggaaaagcgggtgccgacaccgcgtgacagctatgacgcatttttagatgcagtgtgtgagctggtagctgaagctgaccaacgttttggctgtaaaggttctgtcggcatcggtattccgggaatgccggaaacagaagatggtacgctgtatgccgccaatgtccccgctgccagcggtaaaccgctgcgtgccgacctgagcgcacgtcttgatcgcgatgtacgccttgataacgatgccaactgttttgccctttcagaagcctgggatgatgaatttactcaatatccactggtgatggggttgattctcggcaccggcgttggcggcgggctgattttcaacggcaaaccgattaccggtaaaagctacattaccggcgagtttggccatatgcgtctgccggttgatgcgttaatcatgatggggttggatttcccgttacgccgctgcggctgtggtcagcatggctgcattgaaaattatctgtctggtcgcggttttgcgtggctgtatcaacactattatcatcaaccgttgcaggctcccgaaattattgcgctttatgatcaaggcgatgagcaggcaagggcgcacgttgagcgttatctggatttattagcggtttgtctgggaaatatcctgaccattgttgaccctgacctggtcgtcattggtggtggcttatcgaatttcccggcaatcacaacgcaactggcggacaggctgcctcgtcatctcttacctgtagctcgtgttccgcgcattgaacgcgcgcgccacggtgatgcgggaggaatgcgtggtgcggccttcctacatctaaccgattaaacaacagaggttgctatgctgtcgcgtcggggtcatcggttaagtcgttttcgtaaaaataaacgccgcctgcgcgagcgtttgcgtcagcgtatttttttcagagataaagtggtgccggaagcaatggaaaaaccaagagtactcgtactgacaggggcaggaatttctgcggaatcaggtattcgtacctttcgcgccgcagatggcctgtgggaagaacatcgggttgaagatgtggcaacgccggaaggtttcgatcgcgatcctgaactggtgcaagcgttttataacgcccgtcgtcgacagctgcagcagccagaaattcagcctaacgccgcgcatcttgcgctggctaaactgcaagacgccctcggcgatcgctttttgctggtgacgcagaatatcgacaacctgcatgaacgcgcaggtaataccaatgtgattcatatgcatggggaactgctgaaagtgcgttgttcacaaagtggtcaggttctcgactggacaggagacgttaccccagaagataaatgccattgttgccagtttccggcacccttgcgcccgcatgtagtgtggtttggcgaaatgccactcggcatggatgaaatttatatggcgttgtcgatggccgatattttcattgccattggcacatccgggcatgtttatccggcggctgggtttgttcacgaagcgaaactgcatggcgcgcacaccgtggaactgaatcttgaaccgagtcaggttggtaatgaatttgccgagaaatattacggcccggcaagccaggtggtgcctgagtttgttgaaaagttgctgaagggattaaaagcgggaagcattgcctgatgcactacgcttatcaggcctgcaaggggacgcaattaattgaatttgcgggttttgtgggccggataaggcgttcgcgccgcaaccggcataatacacacgcattttactgtctcttttaccgtttactcgtcaataacaacacggcaataaacgtacagacaccaatcagccctgcccagagtggcgatattctggtaatcgcaaagctattatcgatatacaggcataaagcctgatagcccatattggcaatagtcatcgctactgcaaattttaacgcataaataaaacgagtcgtgtagtaaaagaccgaggaaaataagacaaacgttgcagcccaggcgataaaacctaatgtgttggtgctgccggggggatcattttcatgctgttttcctggatgcggataatatgttagtggaggcgtcggttgttttaatatctgtgcttgtagaacagccaatgcattattgattccctgataccagaggccagcatgtaaataagccagtgtgtgattttctatcagaaggccgagatgtttatcgtccagaccgctttcaacctggccgttggtgatcataattaaccgtggttcgcgggtagtaaatagtaacagaacacttccttttacatcactcaatgaagatgacgcatgcgccagcatcgctttaccattttgtctgagactggcttcattattaatgtcgggtaaaaccacaataaacggtgcaattcccgtttgttggcgaaaaagctcggctttatgcgcgatctcttcagcatctggtacagtaccggtaacgtccgtaaaaagtgtcttcattattggaattaatggcttgctggctgctgtcagaggcaggagtatcagtaaactgagcagtataatgaattttttcatgggcgggacttccgtttcctgcgtgattttttagaggagggcatacttattaataaaccgacggcgataaaaataacgcccataatgccgataaacccccatttaaaaaaattaacccacgggttatttatctcagccttttcaggatgcccgggagaataataaacattaactttatcgccttcgctgtcttcataaaaatcgctgccgatactcgaattgaaaattagcgtgtaatctggcgtcggtcgaaaggcaacgacgggataccacgaaccatctttacccgtgcgatgagaatgactggagtgccagacggtatcaacaatgacgccttcggtatgaatcgcgtctttgctataggtgaactggttataaaagacaacaacagaaatgaggatcagtaccagaccgataccgaggaatatacgaaagaaaactttactgtcctgactcattagccacatccttgctaactaaaaaacgggcggtaataccaccgcccgcttgctgaattaacgtcctgctttcagcttctgataatactcttcataaatgctgctggctgcgccaacgtcattctgccattcgccatttttaatggtttcagcatccgggtagagcgttttatcgttcgccacttccgggcttaacagcttacgcgccgcaaggtttggcgttggataaccgatagtttcggcaacctgttttgccacatccgggcgcagcaggaagttgatcaatttcagcgcgccttctttgtttttggcatttgccgggatcgccaggctgtccatccagaaaatgccgccttctttcggccataccacgtcaattggcgtacccgcctggcgtgcaacgaaagcagaaccgttccagatcatgccgaggttaacttcgccttccatgtacgggttagccgggttatcggagttaaaggctgccacgtttggcatcagttttttcagctcgttatatgcagcttcaatctctttcggatcggtggtgttaccggagtagcccagcttacgcagcgccatctggaacacttcacgggcatcgtcggtcaacagcaggctgcctttgtactcaggcttccacagatcggcccagctggtgacagatttcggatccaccgcatcaccgttaacaccaatcgccgtcgcaccccagatatacggaatggagtaatcgttattcgggtcaaacggcttattgagcatgtctggatcgagattgctgaagttcgttaacttcgacttgtcgatcttctggatcatcccttctttacgcattttatcgacgtaataggttgaaggaaccaccaggtcataggcaccgtctttgtacgttttcagcttggcatacatggtttcgttcgactcgtaagtcgaatagataaccttaataccggtttctttggtgaactgttcaagcagtcctggcggcacgtactcggtccagttgtagaaatacagcgtgttgttgtcatcggcgtgagcggcgctcatgcccagtgccagagcacccgccgcgagcaggtggcgtgaccattttttcatttaacgtcccctgtgttacctttcgttttatcacgagcaataagctggctggcaataaccatcaccagcgacagcaccagtaatatggttgccagcgcgttaacttccggcgatacgccgactttgaccatcgaataaatttttaacggcagaatttcataacttggtccggtgacgaacgaagaaactaccacatcgtccatcgacagggtaaagcttaacacccagcccgccgccaccgctggcattgccagtggcagaatgatttttcgcagaatggtaaattcgctggcaccgagatctttcgccgcttccagcatccgcacgtcaaaacctttcaggcgcgaatacaccgtcaccaccacaaatggcaggcagaaggtgatatgcgagaacagcagcgaccagaagccaagctgaatacccagcagcataaacagcaccagcagcgaaattgccatcacgatatctggtgacatcattaccacaaacagcattccgctaacgaacggcttaccgcgaaagcgataacggtacagcgcaactgccgtcagtgaaccgataagcgtagcaaacgtcgccgaaaacaccgccattgttagtgaatgctgcgctgcctgtaacaggctgtcgttgttcatcagcaggctataccatttggtggtaaaaccctgccagttgatgccaaagcgcgagctgttaaaggagttcacaatcaaaataatgattgggatatacaggtacgcgtagatagcggtcataaaaccgccgcgaagcagtcgaccgatcattcgagttccacctttttattcataaggtggagcactttcaggattttgaatttattcaattttttcctttctccaaaatctctccaaaacttttccccaaaacaggaccacgcattttacagcatttttatacatggcgagcacactaggacagaaaagtattccagtttgtttacccatatcactttccgaatgagatttttgatgcgatttcttcgtgttgaaaaaacacataatgtggtattagaattacctaacatgattcactttgaatccgtttgaaatctcattgaactcaggagtgactatgaagcgtaaaagagtggctttgttgcaagccattggctcggttatagccctgagcccagcggtcgtttcagcaaatggtatgccagcgaatccagttgccgctttgcgtcaggatgctgcggctatcagaggcgatttccaaagagcaatggtatccgttaacgttgaaaagctgaacaatgccagatcaaaaagaaagtgagaacaccaaactcacttgtgaagaacaaaaggacaatgaactggtttctcgagtaatcgaaaatccagaagtcttaaacagggttttggagagcccgcaggtgcgagctattgtttgccagcattttcaggggccggttcctccgccatcaatgcttaaaaagtatgatcaactgatgccagggcttgcaaataggcttgttgagttgactgaaaaggagcaggctcatcgccacaaaacggtggctgataccattgatattgccagagatggtcaaacaaaggctttttggctggcgatattgattatcttcgttgctgctgtctttggtgtcatgggggagactgttcttgctggagctctcgtttcaatagatcttgttgcattggttacggcatttattgttggaaaacattattctaagcaggaacctgatcaagattagtctccaaaccccggcatcagccggggtttttacatcagtaaagcaatatcaacatttttatcggttgttaattactggcaacgttacagctgtatttatttcgtcaaacaaccaatttaacccattcctgaccacgagtatcgttataacgatcggtggttgcttggactttatgtcccagtaatgtttttgtatcgataccctgtgcgcggtacagtcgttctgacagggagcgttgttcatgaaatgttggtggtgtttttcctgctggtggagttattcctgccagatcccgcgctttagcaaagtagtcgctcaggttatctttactcattggttttggttgtttctggtgccgactatgaatcaggtatggactcaatattctgtccttgcatccatcaatcacttcttttagcgatattccaatggcatcacagcgtagcgtaagcggtaacgccagacgcattccggtttttccctgggtgatatgcaagtgttcgttccacacatctgaaaaacgcatgtggcaaatgtcatcacggcgctgaccagtaacaatcgcaagaagcattgcgttacggataaagtgtttttctggtgttgaattgtaaattttttgccagtcctccagggtgagtctggctctggttactttagggatcggtttacgggtagcctccggaggattccatccaggaggaacttcccctgcatgctgtgcttctttataaatatcaacccataatccacgatttactctcgctgtgctgaccatgtctttatccagccactcatccagtattaatgcaaagtctcttacttccagttctttcaatgggtggtttcccagacgggaaaccaggtatgcagccattcgggctttttctttgtgagttgtagctgcaatatctccatttttcagtcgcgcgtcctgtattttcagatatcgatcaacccatgactttaatctgataccccgacgttttgttgctgacggactttcatcaattttgcgcatgaaatattcagcttctgctgcagctattcgctgattggctgtggaagcgattttttctgctttgcctttgtctgttccgagaccgtgaaattttccagtcacagggtttttatactggtagtaaaccctgccagttctgcgatcaaacttttcgtaaagaccggttacgtcagtgctgttttttcgtggcctcggtgacatgagttaaaatctccttcagtgcatcatcatcgccagtatgaatttccggcgcaattcccgtttcaccaggtccaacaaatactgcccggcgatctatcagccaacgcccacgaattttttgtggtcttggaacgatgtatcctagttttccgtatttcaccagggtagtgtttgttattgggagactgaaccgttttggcttccactcatcgagcgttatcaggtactgttcgctcatggctatcactccggaacgcgccagttgcagaataccaacgacaactggcgacagttgaacattaaaaatcagcctgactcgggatcagtttttgccagatagctgaaacgtattttgcctggtaacgagcgtcatcaagtgcattatggcgctcaccttcgaatggaatagccgttctggcatcgaagtctatggctttccccagctcaacgattgtgcgtacatcgcgatcgttgtagtaacgccacgggcaggggatcccctgccgttcgtatgaacggcgcaaaatcgtgttgtcgaagttggctccatttccccaaacctgaacaaaaaattcaccggagttttcgtcgataaattcccgcaattgtaacagtgcatcatctaacgggatttcatcggtcataatggcagattgcgcttcgcgtgattgcttaagccaccatttaatggtgtcccgatcaatgactccgccagcagtttccagatcgatagtcttactaaattccggtcccatatctccggtttgcggatcgaaaaatattgcacctattgagatgatcggggcatcaggattttttcccatggtttcaaggtcgatcattagatggtcacacgtcctgctggtggatgtgatttcttgatgaccgttcaccttaattgggtgatctgccgtctcgccagtttcattatcgctatcgtgatgctgattgccgccagtgttctccttgtgtggatgttcagcgccttccatttcctccggatcatcttcctgaacttcaacctgatactcttcatcgaatgtttcctggtatgtagcgtcgcccatcaccgcgccacaatcagggcagttgccgccgccggtctgaccgcaggcggtgcagactttttccacttcctgttgcactactggttcaggtagtttcgtttctggctcgttttgttgcgtattttggctgttttgttccgctttctggtcgttctgttccgtttcttgctggttctggttcacagaatcgcgggtttcaatccccttcacccatttcggatcattcggatcgctaatccctgcaacaaattcaccacgtgatactgcaagcagttcatcggcgtcaggctggctgatattggctgcctgcataattttgtttacttcgtcagcggtaacttttaccggccctggttgtgcggtcgtgtcagatgcaccagtattttgttgtgaacctgagtatgtaccgtttttgcgggcgaaatattcttctttcgtgatttcagtagcccctgcagccagtgccttatccagaccagaaagtttgtttgcgcgaccgtatttttcgctatccttgtcggtgaagaggaagtagaacggcccttcacgctctacagatggttcgacttccactttgcattcggttttttcgttgtccggaattgccgtttccactgcatcagtttctggtactggcgacgagagagtatcagttgcgctctgatttcttccttcatcttcaaacacgccctttgtagtcaggtattcagtaatgtatttgttcagtgccacagggtctttgtgaatgtcgatcggacgttcacggacaaggccaaaaatagtctggcggtcgtagcgaagggcatcaggctgtttgcgcattgatgccgagatacgcttccagtcttcgcggtcgttgtcgataacttctttttttgcccagcgatggatgctgccgtcaatgtttccggcatccacatcacaggccagagagcgtaggccagttcgtcatccagtgttttccatgtctgcttgtattcgcgatgagtggcagcaatgaccgggctgatttttcctgttgaattttcagtgttctgttgattggctctggcgcgggcgagatcaacaacagacgtgtattttccggtttccttgcgttcaccttcgcgacgttttttccagatgcgcatctctgcctgaatttcgggccatttagcaccaggaatacatttatgcttaacccacccaatggcgtgcaacttaagctccggatacatggcgttaacttctggcattttcatcaacgcttcaacgatatgtccgtcgaatgttgccatgtcttcctgcaacaattcctgtgcgctaataaccatatcaacggttatgttttcacatgtgtcgaacttaaccatgacagcgttctgtacttcaggggccagcttgtcaaaagtgacgttcatcggatcggattcagtctcaaccgggacaaaagaagcagactcctcatcccagcggttttcctgcatatattcagcatcccatgaatcgagggcagggcagggtatgccaggtttatcctcgcagacaataaatttataagcgcagtcctgagcagccggataatgttccaggaattgccagtgaaattttgctcgagcacggcgttcgtcgccagcttcaatggctgtggctacagccacagcgccttcttcccttgttgccagttcgtcaggaatagcggcgcaaataaagactttactcatttgttttaacctcatgacagatttaaggatgaacaaatccctgccattgctggcatataagaatgaaaccggatatttattacggaactgttttaaagacctgccgggatttcgatattatcctggtgaataactttatcgaccgggtaacagttaccgggaattttctgttcggttgctgcagtcatacactcctgcattgtcctgtgaacactgactgcaatatcaactggctctccggaaacaagaaaaactgtcagaacaagcacaaatgctgaattcattgtgcacatccttttggcatcagacgtaaacgagccagcattgaaacaatgcatattttatttaatagctcccgttcttgttttctcttgttaatggcatcttcagtaaatacagggttactgatagtgacaccaatttcaaaacaaccttcagacgtattaacgtttggtaataacgttttcattatcgcgtcctcaacaatgaattttgtgatgcagtgcctggtgcctccaggtgacgttaaccagttaacaattaacgccggatacagagaatccacccataacactgtttttggttttaactgttccgcgtgcgcttagccgcattcaccgcatcacaaaattcactttaaaaaagggcggcagagcagtcacggagtaaaaactgataccgccaaacgtcaccagaaaattgataacagagggcgttgcagcggggttgtcacttaagcgtatggtcaacctgacaacccggtgtcctcaacggggaaggaataaccccgccatacttaccgccgcgccatttcgcgggttgccacaaccggaagcgcacggtcgacgaaaatttaacgacaggctatctatgaaccagctacctcgccgtgcgctttcgcgttatggtctgacttttcagggaaatatcctttcagtaaactgtcagtgccggatgttcacccgtgtccggcgcacgcactccacctcacccgtggagaactccttaattaccaaccctcaggagggtgaatgttaaaatcaactcttattgctaaatgcctttatcaaaatcgcatggtaagcagcatttcaataggcgagtctgcagttaaaagtattttcgaagagtacttccccgggcatgattttaataaatggaataccaaattaccgccagcagtttcaacgcgtattctgaaagcaactgaaagagcaagtacaattcgcgttaactatttcattaaagatttgtgggatctttgatatccacagagcctaaagtatgtgcatatggatgtgctattgtgcgccctcgcagatttgcatcattttctaaattcactgaacgaaacagggcatcaacaaggctctgtacaatgcaaaggcaatcgaagactgtcgctgtttctgttttgattgatgaaagaacatggccattcacgcaaacagaaattacccgttcattaacatcgctttcctgcttttgattatcagaaccatatagcccagaaaaagcattgcgcacattacgaaccatattatcgatggtttcttttttggtgtatgccgggtcaattttcaccagactatcaccgagagtcgttgcagcaattgtctggatttcttttggtaaatctttaaattccattattagcctcgttggttagctattaacgtgggtatgtaatcattctggcaatgcttaatgccgctgctttttccagattggtgatatcctgctccagagagaacagattttcagcctgcttagccctggcttcattagcccatttcagatcctgcgctgcattaattttctggcgcatccactcataaagttcatcatcggtatagtctggcgcgatgatgacaggttctcgtttctgcatgtcagctccttgtggttcgcattgcctgcttttaaccacgtcaggcgaggtggtatcctctgaggggtctgttactcgagaggaaattggttatgaatacaatcaagttttcttgcccagaatgtggtggcgaagtctttgacacatcctttaagccgcagggctctgacagtttcgcgggagccatctgcaaaaattgtggtcaccttgtaactgaagatgagtcctcgcagttcgatgacgaaatcgttgacaatatcttcggtgcactcaccagagactttctgaaataaagacgcataccgcttagttaccgctctgataactcttacctgtccggcaatggcgctgatgtcaatataaagcgccattgctgcttctttgccgatcccgtgatgccttccattctgatgtttgacttcgcccactgagaaatcctctgtttccccttaacgccggggtagcggaacaaaaacctgctgcatagttattaaagttggaccctgccgtcatgttcttacgcctcaggctggctacttaacccctgaccactgcctggtaactcgaagtattgccctgcattctgtggggcggggtgggttggtatgaaaagaaggatacccataggtatttaaaaagtaaatacccatgggtaactttttgcggtgtcttaactggtgactagttgtttggtgagctatgatgcgttttgtgctttctttttacggatttcttcgtagatcatattgtaatactgttttttctcttcaagagtttttaataagttatccgcttcactttctggcagttcgtctaagagatctaaaaaaatacgttgtcgtggcgttagaacccttgtttcataactggaggctgtgttcgttgatgatgaaacgataccatccatccatccccggggtaacccaaaggactcttcgataatctccaccatatcatcagcgatccgtttttttccctttttcccctctgggtacaacattcttgatacataagaaggctcgcgcccgatctttctggccacgttaaccgctttaccatcgcatttctcatcacgaattttgatgagttgctgtcgtctaaattcatatttgtccataggtaaataatagatgcgattaccgcaaggtaaacaacctgcgggtattgacatttgtttacctgtgggtattctttactgtgtttactaaggagtagctatggaagaattaagaatatttctcaattctctttcgtcagatgaacagcgtatgtttgcatgcgagtgtggtaccagcatcggttatctaagaaaggcattgagtaaaggtcaagtgttaggggcatcgttatgtgtccttattgagcgagccagtaatggtgaagttacacgtcagcaactaaggccttttgattggatgaatatttggcccgagctggaagataccaaaacgttaacacaaccactttctaggagcttgattcatgaaaatcaagcatgaacacatccgcatggcgatgaatgcctgggcgcatccggacggtgaaaaagttccggcagctgaaataaccagggcttattttgaactgggtatgacgttcccagaactgtatgacgacagccatccggaagccctggctcgcaatacccagaaaattttccgctggatagagaaagacacccctgatgcagttgaaaaaattcaggcgttgttaccagcgatcgaaaaggcaatgccacctttgctggtggccagaatgcgcagccacagttcagcttattttcgggagctggtggagacgcgggagcgactggtgagagacgctgatgattttgtcgcagtggcaatcgccggtttcaatcagatgaaccgtggtggcccggcaggaaatgctgtggcagtacattgactgacaatagccatatcgaatcgcttccggcaactcgtgagtaaaaagattcggtatcagaagaggtgagtatggctaacgcctggctcagattatggcatgacatgccaaatgaccctaagtggcgaacaattgccagggtgtcagggcagccaattgcaacagtgatggcagtgtatatccacctcctggtgagcgcgtcacgaaatgtcacgcgaggtcacattgatgtcacgacagaagatttggcaagtgcgctcgacgtgacagaagaggtaattgattcaattttgcagacgatgcaggggcgggtacttgatggtgatttaatcactggatgggaaaaacgccaggtgcttaaagaggacaacggcaatatttcgcaaaccgcaaaatctcctgcagagcgcaagagggcgcagcgagagagggaaagaaagcgggaacaaaatggcgattgtcacggcgcgtcacgaaatgtcacgcacatgtcacgacgagtcacgacagataaagatacagataaagatacagatcaagaagatcaaaacactatggtccatggcgtaaaaaacgccacgaaccaggcaggggatgttcagaccgtcaatcttggtcagccagcaggcacgacaccggaagccgattcagcgtatgcgctgaaagccgattcgggcgctgtgcagcaggtgatgaccgcaaggccggagcaatcacaccaactgcagcagcctgaagccgattccgccattcagcgggaagccgatcgggtagtcccggaaaacaccgggcagtctgtgggacgagtggattatccggatgtgttcgaacaggtctggcgggagtacccgttgcgtgccggggcaaacccgaagaaatccgctttcagtgcctggaaggccagattacgcgagggggtgccaccagaggcaatgctggatggcgtgaggcgttacgcaagatacctagcggttaccgggaaaacgggaacggaatttgttcagcgggcgacgacgttttttggaccggaccggaattttgaaaacccctggttgctcccggtaagcggcacgaacaaccagcgttgtgtgaatcatatttctgaaccggataccgaaattccgccgggcttcagggggtaagtgtttatttcagctcatgaggtaattatcaggaggagttgtggcaaaagtttttacacaagaagagcgggaaaaaattaaagggcaggttgttgaacttgtacgccagagtgggcgcgagacgttacgtcaactggaagccaagacaggtgcgacaagatatctgatgagcgttctcgcaagagagctggttgccagcggcgatgtatacaactctggttacgggttattcccgtctgaacaggctcgtaaggactggcaaaatgcccgcaaaaaactctcaagggcaaagctgaagaaaaaaacatctgtggttgatccggaccttatctggtcgttaccagacggagaaatacgccgctatgacaggcgtctgaacataatctgtcgcgagtgccggaatagtgaagttatgcagcgtgtactggctttctatcaggggaattttcaggaggcggcgcagtgagcaggattgactaccaggaattggctgctgctaacgcttccctggctgatgtacgggcggtggcgtttaacgacctttgcgcggcgtttgccaggcacgcaaaagttgcaggactggatgatgccgataccgtaacgcttaaggaagtgacagaagcattgttgcattgtgcggaacagattcgcgcgcctgaataattaaatttagtgttgtaaataaaatttaatccttaaccggagggatttctgcaccctcagaacatcaggaggccgcccgaaagggcggtaatgaaatgcgaaagttcagaataattattgaaacgggaatagctggtggagattttgaggatgtattcgaagtggatgatggtgcgacaccagatgaaatacaggacgaagcaaaagaaattttctttaactactgcaattactcatatcacgaaataaaagatgaggaggaagaacaaaatggctgattttggttcaactaaatacaacgtcagttttgaagaatggcatgaactgttaatggactatgcagagttacgcggtggaagtgccgctgatgctgaagcatggcgttatgactacgaagcaggaaaaactccggtcgaagcatattgtgatgagtggggcgatgaatgagcgagattaattatcaggaaggacatgaaacggcagggcaggcaaaaccagttgcatggcgatatcgctacgtgaaaaaaggcattacggactcacagggggagccgtgggttggtgactggaaatatgtaccgacaaaagaggattgcaacgacaggccgagctatgaaattcaggcgttattcactgccccgcctgtgccactgacatcagaaggactggttaaagccgtgcgcttttatgaacaggtaaagcgtgagaatccaccagtcgaaacaggagcatggaaagatgctgttgattgggtactcaaagaggcctgcagtgctgtcattctgggtaaagccgacaacccaccagcttccggcaatcaggttagcgaattaacaatgtgggttaaacgactggtcagccaactgaaaaaagccaagccggactgcaaattaccggagaaggcgatggactacctgaagcgaaacggactgataagcgtggaggatgttttacggtgagatagtaaatgcatgtaatgagacggggggggtgaggggaggcttcatctggatagatcttgcaccgttcatatgttataaaaacaattcctactgttaaatcgttgtttgttttagttgctatatttaaggagtgaatatgcagttaattgttgattacccagatcataacatttattcatcttttgtggatgcggatgctgaacttcgagagttaaatggtggggcagtagttgtaataacggtaaaaatacctcttactagcacatcggaacagttgtttaataaatacacttgcggggaaagtcttcgtattaaattgaggaatggcgatgaatggaaaatgtatttcgttatgcttgatggagggcgctatatattttcctcgcacctgtgataaaaatgatgagccgagactgtatttacgggacgctgagagaataccatagaaaagcttatctaacttaagtagaattgctgcgggtgcttgaggctatctgcctcaggcatgaacaccaaaggcagatagagaaaagccccagttaacattacgcgtcctgcaagacgcttaacattaatctgaggctcaatctatgaacggcaaatctaggttagcctcttacgtgccgaaaggcaaggagaagcaggctatgaagcagcaaaaggcgatgttaatcgccctgatcgtcatctgtttaaccgtcattgtgacggcactggtaacgaggaaagacctctgcgaggtacgaatccgaaccggccagacgggggtcgctgtcttcacagcttacgaacctgaggagtaagagacctggcgggggagaaatccctcgccacctctgatgtgtcaggcatcctcaacgcacccgcacttaacccgcttcggcgttttttccgttgattaactctagttattagagaaccgaacttttattgatggggcagggagatgaagaaacttgttttagttgcaggtgtaatgattgcaacagtaatgttgggagggtgtgcagcaaaggtcgatccagcgttgaaagcagaagcaatgaagccactaacatgtaatgatgaaaagcaatgtgacttttattggaaacgagcgcaattctggttggctaataattcctcatggaaaattcaaacggcgacagacacgctaatttccacttataatccctctccaaatagtccattcctcgcttatcaagtgagtaaaatgccaaatgaagatggatcctcaagaattttcatcaagcctttttgcgataatatgtttggctgtcaaccaaacccctatcaggcagttgtttcctttaaaaacttcgttaaaacagggcagtagtgtatagcttggacgataaattattagtgaaaacgccgtaaaccctcacccaatgtggactaagtctatcaaacatgactgtgatgattagtccgtagttgttgtctatgaaatctggattgagtcagggtttaatccaataattattctatcgttcctttacaagtccggtatattactttcagtttgttttagcatacccgcttcggcgggttttgttttttcctggcattctggtttacaattcgcacgccagcctgaacaactggcacctgctgcgccagcagagacaaccgatggcgcacgataccaaattacacaattctgatgattctgccgtctttgccagcaggcacgggcggcgttcccgcactttcaaatctgactggttccagcatgacccatgtactgaagaacaggccgaatggctaattcataactatcgcagacgcggatacgagattaagaaagccctcagcctcgattatcgtcactggataatctatgtcaggctcccttattccgaacgcccaccgcacccatcccgcacataccagcaacggatctggaggtaacgtgcggatattacttcgacctgttctggtaccggaactcgggctggtggtccttaggccgggccgtgaatccatgcaagtatttcataaccctcgagtgctggtggagcctgaaccgaaaagcatgcgcggtctgccgtccggagtcgtccctgccgttcgccagccgctggcggaggataaatcattactgccatttttcagcgatgagcgggtgattcgtgctgctggcggcgctggggcactgtctgactggctgttgcgtcatgtcaaatcctgccagtggcctcatggtgactatcatcacagtgaaatcgtcatacatcgttacggtaccagcgcgatggtgttgtgctggcactgcgacaaccagttgcgtgaccagacatccgaatcactcgggcaacttgctcatcaaaacctgtcagcatggatgattgacgtcatacgccatgcaatgaatggcacgcaggagcgggaattgtcgctggctgaattatcttggtgggcggtctgcaatcaggtggcggacgcgcttccggaggcagtattacgtcgttctctgggggtacgtgcggaaaaaatccgctccttgtaccgcgaaagcgacatcgtaccgggagagcagaccgccaccagcatactgaagcagcgcacaaaaaatcttgcgccgttgcctcatgcccaccagcaacagaacccaccacaggaaaagacggtggtatgcatcaccgttgatccggagtctccggaatctttcatgaggcgacctaaacgtcgccgttgggtaaatgagaaatatacgcgctgggtgaagacacagccgtgtgcgtgttgtggtcagccagccgacgatccccatcacctgattggtcacggtcagggagggatgggaacaaaggcccacgatattttcacgctaccgttgtgccgggaacatcacaacgaacttcatgcggatccgctggcgttcgaagaaaagcatggttcccaggttgatttaatttttcgttttcttgatcacgcctttgcaaccggcgtgctcgggtaaaagaggttactgatgcgtatagagtttgttttgccttatccgccgacggtgaatacttactggcgacgtcgtggcaacacatattttgtatcaaaagtcggtgagcgttatcgccgtgatgtggcactaattgttcgccagcagcggttgaaattaaacctgtccggaaggctggcaataaaaattattgcagagccaccggataagcgccgccgcgacctggacaatatcctgaaggcaccactggatgcgctgacgcatgccggacttctcatagacgacgagcagtttgatgaaatcaatattgtgcgcggactgcctgttcctggtggtcggctggggataaaaatcacagaactggagtgcgcatgaataaccagtatttacagtttgtgcgtgagcagctcattatcgctaccgctgatttgagtggggcaacaaaaggtcagcttgaagcctggcaggagaatgccatgtttgatacagggcgttacaggcgtaaaaaaatccggtaccgcgatgaagtgactggaagaatgataacgcgggatagtccaccgataccgggaaaacaatcactggcgaaaggctcatcaattgctctggtaagtcaggttgagttttcgacatcatcatggcgacgggcagttctgtctcttgaagaacatcataaagcctggttgttgtggtgttacagcgggagtatttgttgggaatatcagatcgcgataacacagtgggcgtggaatgaatttaatactcaatccggtaccagaaaaattgcagggaaaacgcaggaacgcctgaaaaaattaatctggctggcggcgcaggcattaaaagcagaactttttggtggggaaggttatgaataccaggagctggcattactggcgggagtgacaactaaaaactggtccaaaacatttactcgtcactgggttgcaatgaaacacatttttcaccgacttgatagtgaggctttattgtttgtaatgagaacacgttcaaaacaaaaggcggcattttcaaagcaaagtgttgcaaaagtagattgaaaggcatatatttcatgcaaatctgatattttgccgattttgtacgtgatggcaaaagcaaacaaaacccgcccacaagcgggttttttgtgccacttatctcggatagacatggtgaatgcgctggtggaggagataagggtgatttttgaatgcttgcaacattgatttcgtaacgttattatcctgcgcccggccctttagctcagtggtgagagcgagcgactcataatcgccaggtcgctggttcaaatccagcaagggccaccagccgccactagctcatcaggaaagaacgtcaaccctttaagttgagtgtgcgaggttcgagtccccggtggcggtccagtgccgacttagctcagtaggcagagcaactgacttgtaatcagtaggtcaccagttcgattccggtagtcgggcaccatatgcgggcatcgtataatggctattacctcagccttccaagctgatgatgcgggttcgattcccgctgcccgctccagcagaggacgattgatactaggttgtgttaggcactgacacattttatgtggggcgtttttcctgactccttacctcgccctgtactgtaaggagtgatatcgcttgcagcaccagtgccattttttacgtcaccggaatggtgcattattggtagagatttgcaatgtttctggcaggggccgatgatgcatcattctggtgttgtaaataacaccatgacattgagattaatcatatattaagcaaaacctggaaatgcatccttaaccgcctctatcgggcggttttttttattctgaactcagaaaagaatacacgggcattgatattacccgtgtggcaaggccatgaaagctaataatgaactgagcgcaaaaaaagcgcggctgtcggattaacgccgcgggacaaagtccgtgaagaagaataagcatcagtctcctccaggagacgatttgatattactaagctttaaaaatggtttaaatcccccggattaaccttaatttcagataagctttatttcattttctccgagccacgtcaggcgcacatcacatcagataacaccacataaaaggcatctgcgggtgtctttgatgggggtgttttttacgggtcgctggtggcccttttttatttacaggagaaaaagtatgtctgaacccttatccggttccggcacggctgcggcgctcggtggagcgacagtattcgggctgtttaccggaacggatttcgggattgtgtttggtgcgttcgccggggcgttatttgtggcaacgatgccgcaggcactttcagcctggcgtgtggcggcgcattttctggtgtcgttcattatcggcgtgctgggcgcagaggttctggcatcctggctggtaaagcatacagggtttgacggtgcacccgtcgacgcactgtgtgcagtgctggtgtcagtggtgtcggtgaagattctctcgttcatccaccagcaggatattgcatcgctggtgtccggtatgttctcccgcctgcggggtggaggaggcggcaatgttaagtaaccttcccggattgctgaatgtggcgttatgcacggttatcgtgctggcgctctttttttatcgtcgccgtgattccagacataaaccgctgatgtcatggctggcctggctgctgatgctgctgtatgcctttgcgcccctcagctatctgtgtggtcgcccgttagcaacgggctggcctgaagtgttttttaatctgctgttctgcgtgctggtgatacgcgcgcgcgggaacgtcacaaaaatctttccattgttgaggtgaatatgtcgggtaaattcagatttagtcgtcgcagcgaaaagaatctggagggcgttaaaccacagctggttgctgtcgttcgccgtgcgctggagctgacggaggttgatttcggtattacggaagggctgcgcacgaaagaacgccagaaacagctggtcgcggaagggaaaagccagaccatgaacagccgccacctgaccggtgatgcggtggatgttgttgcctgggttggcagccaggtgtcatgggactggcctctgtacgagaaaatagcgcaggcatttaagcaggctgccgcagagctgggaactgccatcgaatggggcggggactggaaaacactgaaagacgggcctcactttcagttgaaacgctgataaccaggtgtgttatgagcagaaaacactggacacacagaatgccgcgaacaacggcgaaatgggcactggtagcgatactagtgccttttttcttggtgggatgcgtcagcatggataaggcgcgccagcttttcgatatggcttctcaggtctgcgaaattgtcgacggtgttcggcagtgtctgcagaactgaacgacggtgagagcagaatattttttagcggagcgaagttctatgccatcacaaatcccccgcgcatgccgtaagcgtggctgcgcaggcaaaacaacagacatctctggctactgcgataaacatcgtggtgaaggctgggtacagcatcaacgcggactaagtcgccaccagcgtggctatggcacgaaatgggatgccatacgtgcgcgcatactgaagcgtgataatcatctgtgtcagaactgcctgcgcgatgggagagccgttgaagccagaactgtggaccacatcattccgaaagctcatggtggcacggatgcagacagtaatctgcagagtctgtgctggccctgccataaagcaaaaacagcgcgcgaacgcattaattgataacagttcccatctgtaggggaggggcgggtcaaatctctgcaaccctggcagctcagtaccgccgcctgacccttcctcacatcgccgcaggttcgaaaactttttttggaaatgtgaacaaacgattgataggtaagaccgattatgtcaggacctccgaaaactccgccacgcctgcatttgattcgaggcaacccctcaaagcgccccgttaaaagaccacaaaaaaaccgctaaaaaggatgaaaaaggtcttcctaaaattccgcagcatttaggggctcaggggaagtactggttcaggcgaatggcggaagagctgaatgcggaagggatcatttctcagcttgatgcgcgtgcgctcgagttgctggtggaagcctacaccgaatatcggcatcactgcgaaacactcgatgttgaggggtatacctaccgcacggaaacgcagagcggtgatgtactgattaaggcgcaccccgcggcggcaatgaaagcggatgcctggaagcggatccgggcaatgcttgcagagtttggtatgtcaccggcaagccgggctaaagtaaatatcgccggaccggatgatgttgatccgctggcggagcttttaaaagcgagagactgatggcaaaagtggctgacgggatccgctacgccgaacgtgttgttgcaggagaaattgttgctggcgaatttgtccgcttggcctgccagcgttttcttgatgatctgaagtacggcgaagagcgggggatttatttcagtgaaccccgtgcgcagcacatcctgaatttctacaaatttgtgcctcatgtaaaaggggcgctggcaggccagcccattgaactgatggactggcatgtatttatcctcattaatatttttggttttgtcattccgctggtgaatgaagagaccggggaagttgtcatgcgcagcgatggcagcggacgtccggtgatggtgcgccggttccggacggcgtacaacgaagtcgcccgtaaaaacgcaaaatcaactctgtcatcgggtatcggcctgtatatgacgggggcagatggtgaaggcggtgctgaggtgtattcagccgccaccacgcgtgaccaggccagaattgtgtttgaagacgccaaaaatatggtcagaaaagcccggtcgacactcgggcggttgtttgatttcaacaagctggcgatttaccaggagcagagcgcatcaaaatttgaaccgctttcctcggatgcaaacaacctggatggtctgaacatccactgcgccattattgatgagctgcatgcacataaaacccgcgacgtgtgggacgttctggaaacggcaaccggtgcccgcctgcagtccctgttatttggtatcaccacggcagggtttaacaaggaagggatttgttacgagcagcgtgattacgccatcaaggtattgcgtggctataacagcgatgtggagggcgctgtaaaagacgactcctactttgcgattatttacaccctcgatgagggagatgatccgtttgatgaaacggtctggcagaaagcgaatcccggcctgggcatctgtaaacgctgggatgatctgcgtcgtctggcgaaaaaggcgaaggagcaggtttctgcgcgggtgaatttttttaccaaacacatgaatgtgtgggtcactgccgaatctgcctggatggacatgattaagtgggagaagtgcgaatacatcgctccacagcatgagctgaaaacgtatcccatgtgggtcggcgtcgaccttgctcataagattgatatctgtgcggcggcaaaactctggcgaacggataacgggcatgttcatgccgattttaaattctggcttccggaagggcgactggaacggtgttcacggcagcaggcagaactttaccggaagtgggcagagatggggaagctcatcctgacggatggtgatgttatcgatcatgctcagataaaaagtgacttactggaatggattggcggtgaaaacctcagggaactgggatttgacccgtggagcgcaatgcagttcagtctggcgctggctgaagaagggataccgctggtggaagttccgcagacggtccgcaatctgtcagaggctatgaaggaaacggaatcactggtttatgccggacgtttccaccacagcaatcatccggtcatgaactggatgatgtctaacgttacggtaaaaccggacaaaaacgacaatatcttcccgaataaatccacgccggaagccaaaatcgacggccctgttgcgatgtttacagcaatgagccggatgctggtcaatggcggtgaaccggagccggatctgtctgagcatctggtcagcgttggtattcgctcgctttaaccgaggtcattatgtttctgataattctcacaccactggtgggcgtgctgggggcgcttttgctgtcgtacggcgcatggctgatttatcccccggcaggttttgttgttgccggggcgctgtgcctgtgctggtcgtggctggttgcgcgttatctcgatcgcggtcagtgggtcgcctccggaggtgagtaatgtttttccaggggctttttcaacgcaaaaataacactcccgttacaacacccgggatgcttgcggaagagctgggattgtcatacgacacctataccggaaagcggatcagcagtcagcgggccatgcggctgacggcggtgtattcctgcgtcagagtgctggcggagtctgttggtatgctgccctgcagcctctacaaaatcaccggcacccttaaaacacgggcggtggatgaacgactgcataagctgatttcggcaaaacccaatggctacatgacaccgcaggaattctgggagctggttatcgtctgcctgtgtctgcggggtaatttttacgcttacaaggtgaaggcgctgggagaagtggtggagcttcttccgatagatccgggttgtgtggagccgaagctgaactgtcagtggcagccggtttatcaggtgacgtttccggatggttccgtggatgtgctgacccaggatgaaatctggcatgtgcgtactctgacactggacgggctggtcgggctgaatcccattgcatatgcgcgtgaggccatttcactggcagcggcaactgaggagcacggcgccaggctgtttggtaacggcgctgtgacatccggtgtgttgcgtacggatcaacaactttctgatcaggcttatgcgcgtatcaaaaaggactttgaggaacggcatgtcgggctgggaaattctcatcgtccgatgattctggaaatggggctggactggaaaacggtggcactgaatgccgaggacagccagttcctggaaacccgtaagtttcagctggaagaaatctgtcgtctgttccgcgtgccactgcatatggtgcagaacactgaccgcgccaccttcaacaatattgaagagctggggcttggtttcattaactattcccttgtgccgtatctgacccgtattgaacagcggatcaatacagggctggtcagggagagcaagcaggggaagttttacgccaaatttaatgccggagcattgttgcgtggcgacatgaaatcccgctttgaagcgtatgccacggggatcaactgggggatttattcccctaatgactgccgtgatctggaggatatgaatcctcgcccgggcggtgatgtgtatctgacaccgatgaacatgaccaccagtccctctgctggcgatgacaacggtaagaaaaaggagagtggagatgcagacaaaacagcgtcttgatataccgctgaacctgaaatccgtcagtgattccggggaatttgaaggttacggttctgtttttggtgttaaggacagccacgatgatgtggtggtccccggtgcctttaccacaacactccagaaatggagcgaaaaaaaggcgctgcctgcgttgctctggcagcaccgtatggatgagcccatcggtgtgtacaccgaaatgaaagaagatgatgtcgggctttatgtcagggggcgattactcgttgatgatgatcccctggcaaaacgtgcacatgcccatatgaaggccggttctttaaccggcctttctattggctacatcctgaaagactgggagtacgaccgtgaaaaaggggtattcctgctgaaagagatcgacctgtgggaggtcagtctggtgacgtttccttgcaatgatgaggcacgtatcagcgatgtgaaaaatgcgctggcgcgtggggagatccctgatcagaaaattattgagcgggtcctgcgcgatgttggactctcgcgaacccaggccaaagcattcatggccgggggatatggcgctttatccctgcgtgatgctgaggatgtggatgccgcactgaatgcactgaaaaatcttaaattttaaccaggagaaaaataatggctgacattaaagatgtggagcaggtcgcgcaggagctgcagcagaagtttgacgattttaaggcaaaaaacgacaagcgcattgacgcgatcgaacaggaaaaaggcaagctggccgaacaggtggaaagcctgaacgggcaaatcagcgagctggagaacctgaaaagcgatcttgaggctgaactggctgaagttaaacgtccggcaggcggcacgcaaaataaagttgccggtgaacataaagaagcgtttatcggttttatgcgcaaggggcgtgaagacggtctgcgtgagcttgagcgtaaggcgctgcaggtgggcaatgatgaagatggtggttatgccattccggaagaactggatcgcaccattctgacgctgctgaaagatgaggtggtgatgcgccaggaagccactgtgatcaccctcggtggctcggattataaaaaactggtgaatctgggcggcacaacgtccggatgggtgggggaaacggatgcacgtcctgaaaccgccacctcaaaactgggtctgattgaaccctttatgggggaaatctacggcaacccgcaggccacccagaaaatgctcgatgatgctttcttcaatgtggaagactggatcaacagtgaactggcgctggaatttgccgaacaggaagaaattgcctttaccagtggcgacggcagcaaaaaaccaaaaggttttctggcttatgagtccactgatgaagatgacaagacccgtgcatttggcaaacttcagcacattgcttccggtgcggcttctggcgtgaccgccgatgcgattattaaactgatttacaccctgcgcaaggcgcaccgcagcggcgcgaagttcatgatgaacaacagcagcctgtttgccattcgtctgctgaaggataacgacggaaattatctgtggcgtccgggtattgagctgggtcagccttcttctctggcagggtatggcatcgttgaaaatgagcagatgccggatattgccgccgatgcaaaagccattgcgtttggtaatttcaaacgtggctataccatcgttgatcgcatcggcacccgcatcctgcgcgatccttacaccaacaaaccgtttgtgggcttttataccaccaaacgaaccggcggtatgctggtggattctcaggcgattaagctgatgaaaattggggctgcaacccgccagaaagccgctgcgtaatgcggtttttttgtgcccgcacagtgttgcgggcaggagtttctgatggcagcaatagtggaaaaactcagggcgcagtgccgtattgatacagatgatgcaactgatgatgagttactgatgctgtatttccgggcggcctgccgcaaggcagaaaattttatcaaccgtaagctttatgaggaggcggtgccggaaggtgatcctgaaggggtgcttatagctgatgatgttttgctggcgctcatgttgctggtcggacactggtacgaaaaccgggaaaattcctcagatgtcagcaaggtaccagtcccgtttggtttttcttctctgctggagccttatcgttttattcctttgtaggaggaggcatgcaggcgggcagattacgtgatcgcgtaattattctgaatgtcaccaccgcccgctctccgtcagggcatccggtggagacggtgacggagggagctaccgtatgggcagaagttaagggtatcagcgggagggagataatctcaggtggagcagaaaccgctcaggctacggtcagagtctggatgagattccggcgcgatgtgacagcgacttcacgtctgaaagtgctgaccggtgcatttaaaggggccattctgggtatagaaggtccaccaataccggatgcacgcgccacccggcttgagatactctgttctcagaaggggaatgtgtgatggatttcagtcttgatttttcaggtctggcggatattgcacgggatctggagacgctcagcagggcagaaaacaataaggtactgcgcgatgccacccgtgccggtgctgaagttatgcgggatgcagttgttgaacgtgcgccggagcgaaccgggaaactgaaaaaaaatgtggttgttctcactcagcgttcaaagcgtcggggggaaattatctcgggtgtccacattcgcggacggaacctgcgaaccggaaacagtgataacagcatgaaagccagcgatccccgaaatgcgttttactggcgctttgtggagctgggaacgataaacatgcccgcgcatccgttcattcgcccggctttcgatacgacagaggaactggcagcacagattgccatacagcgaatgaatcaggctattgatgaggtcttaagtaaatgagggaagccacactgtattccctgctgtctcagctggccggaggacaggtttatccttatgtggtcccgctgacggagggaaagcctgcggtatctccgccgtggctggtgttttctgtggtgtctgacacggcatctgatgtgcttgatggtcaggctgaatccagaattaccgtgcagatcgatgtctgggcgacagtacctgatgacgcagataatattcgtgagcaggcgcttgatgcggtaagaaaactggcaccctccgttatttctaaaacgcagggttatgatcctgactcccgtctgagcagagccacgcttgaattccaggtaatagcctgaggtcattaatgattttatccacccgccgctggcgggttttttattttcaggagacgagtatgtcctctaattttgagcgttcgcaactgacgaaaattatgatttcgtctgcaccggtaaccgcagaaaccctggattctgccagctatcttggcctgagctgtacaatcaaagaggtgcagtttaccgcaggacaaaagcaggatattgatgtcaccacgctgtgttctgttgagcaggaaaatattaacggccttggtgccgcgtcagagatttccatgtcaggcaacttttatctcaatgctgcccagaacgcgttgcgcagtgcctatgacaatgacaccacgtatggctttaaagttatttttccgtcaggcaacggatttacctttatggcagaggtgcgtcagcatacctggtctgcaggaaccaatggtgttgtggctgcaacgttttccctgcgtctgaaaggtaaacctgtgctgacgacagagccgctgaaagtgaaagtcgatttaaacagcacgctgcaggtttctgccggagcgaaactcgaaatggtggttgaggctgccggtggtgtgccgccttattcttatgtctggaagaaaggtagttctcctgtttccggacagacggcggcaacgttcagtaaggcatcagcagcatcaggtgatgccggtgcgtatacctgcgagatttctgactcagcaagccctgttaacaaggtgacctccacttcctgcactgttaccgtcagttaatgaggatagatgtgatgactaaaaatatccgcaatctggcactggcaacgatgtcggggtttcgccacaaaactgttgatgtgcctgaatgggaaggggcaacggttgtattacgggaaccttctgcagaagcctggttgcgctggcaggagatcgttaaagcaaaagatgatgagacaccgttatccgttgcggagcgcgcccgccgaaatctggaggcagatgttgaactgttcattgatgttctgtgtgataccggactgcaacctgtattttcagaggatgatcgtgaacgggtgattgccgtgtatggcccggtgcatgcgcggcttcttcggcagtctctggaactgatcagtgatgccggcgaggttaaaaaaaagtagcgcttccggggatgcgttttctgatgatgctggcgctcaggatggggcgcacattgtcagagttacgccgggaaatgtccgcatcagaaatcatgatgtgggcagaatttgacaggttcagcccgctgggtgacgagcgggctgatatccgggctgcccagatagtttctgcggtttacggtgcgcagggtgtcaaagtcccactgaatgatgcgcttcttcagtgggaacaagagcagacagaaggcgtctcagatccatttgccggactggaaaacgcgcttttaatagtgtctcagtgagtcaacataaccgcttcggcggtttttttcgtccggagaatgagtgtggcgacattacgtgaactgattattaaaatctcggcaaattcccggtcattccagtcagagatctcccgggcttcgcgtatggggcaggattactaccgtaccatgcagaacggaggccggcagtccgctgctgcatcccgtgaaatgcggcgtgcactggcagaagtgacggatcagataaatacagctaaatcttcggcactgaacatggctggcgcatttgccggtgcttttgccactggacatcttatatctcttgcggatgaatggagttcagtaaatgcccgtctgaagcaggcctcacagtccagtgatgattttcaggcatcacagcgtgaattaatggcgatcagccagaaaacggggacggcgttttctgataacgcacgcctttttgcccgttctgcagcttccatgcgggagtatggttacagttctgaggaagtactgaaagtcaccgaggcgatctccacgggcctgaatttatccggtgccagtacagcagaagccagttcggtgatcacgcagttcagtcaggcactggcgcagggagtgctgcgcggtgaagagtttaactcggtgaatgagaacggcgatcgtgttattcgtgcgctggctgcgggaatgggtgttgcccgtaaggatctgaaggccatggcggataacggaaaactgaccaccgataaggttgttcctgcactgattagtcagcttggggcattacgtgatgaatatgcggcaatgcctgatacggtttcatcctctgcaaccaaagttgaaaacgcctttatggcctgggttggtggtgcgaacgaggcaagcggagtgacgaagacgctctccggtgtgctgaatggtattgcaggcaatattgacaccgtggcaaccgctgccggtgctctggttgccgtcggggtagcccgatattttggcaatatggcgtcttctgctggatctgcaactgccggattaattactgcagccagaaacgaagtggctcttgcggaagcgcaactccgggggacacagatagcaacagccagggcgcgtgcggcggtttatcgtgcgcaacaggcagttgtggctacccgtggtacagaaaggcaggcagccgcagaagcgaaactggctgctgcccaggcatcacttacccgtaatattgcggccagaacagcagcacagacaacgctgaatactgtcacgtcagtggggagccgtttgttaagtggggcactggggctggttgggggtgtgccggggcttgtcatgctgggagccgcggcctggtacacgactgtatcagaatcaggagcaggccagagaatctgcacgccagtatgccgcaacaatcgacgaaattcgccagaaaaccgtcggcaatgtcgcttcctgaagcgtcagataatgaggaaaagacgcggcaggcacttgatgagcaaaacaggttaattgacgagcagaaaagtaagattaaatccttacaggaaaaaattgctggctatcagtatgtgctggcaaacccgggctggacaaccgataacggtttttatgattaaccacatgacgtcggtaaaaactgtcacagaagggcttgcagaagcaacaaatcaactggcagttgaaacagtctcgcctcactcaaatgcagggcaaagcgcaatccattcaggatgtgcttgccgggctggaggagcgacgggtggcgttgattcgtcaacaggcggcggagcaaaataaagcgtatcagtccctgttgatcatgaatggtcagtacactgagtttaatcaccttctcgggcttggtaatgagttacttcagcagcgtcaggggctggtgaatgtaccattacggctgccacaggccaccctggatgataaacagcagacagcactgaataacagcgagcgcgaactggctctgtcccgcctgaagggggaagcccgtgagcgtgcccgcctgggttatgctgcggatgatctcggctttgtgggagaggcatatcagacagcaagactgaattatattaataattcactggatgcatggcgaaataaccaggcaaataaacccaaagcgcataaaaagaccgaagcggaaaaaacagaagatatttataaacggctgattaaacagcagaaagagcagatagcactggcagggcagaatactgaactggctaagatgaaatatcaggtcagtcagggcgaattatcaaccctgtcagaagcgcagaaaaaaacgcttttgcagaatgcagcactcatcgaccagaaaaagattcgtgagcagcttgctgcgtatgagagcagtctggcggacagtaatgccagtgcccgggcatctgacgaagcgcagttgctgggatatggtgaaggctcacggatgcgtgaacgactccaggaaatgtggagtatccggcaggcgtttgagcagaaaaataacgagctgctgagacagtatcaggccggagaaattgaagaagccctgtggaaacaggagaaagaactgaataaaaaatatctggaagagcgtctcagcgatcagcaggattattatgcaaaggccgatgctttacgtaataactggaatgccggactccaggagggactgaccaactgggcagacagtgccaccgattatgcttcacaggcggcagatgctgtcgtttccacgatggacgggctggtatcaaatatttccgatgcactggccgggaatgttgtggactggaggaactgggggagttcagttctccgggaagtttcaaaaattctgatgaatgcagccattgttaacggactgaaatcactctccggtgccggagggtggcttggtacggtcggcggatggatttcgggggcagtggcaaacgcaaaaggtggtgtttacacatcggcaaatctgagtgcttacagtaacactattgtggatacaccgacgtattttgcttttgcgaaaggtgccgggttgatgggcgaggccgggcctgaagcaatcatgccactgacacgggcagcggacggctctcttggggtcagggccattggaaatgtgaatggtggtggtggatttgtttattctcccgtgtatcacatcagcattcagaatcaagggagcaatggcgagatagatgcgcgctcagccaggggactggtggatctgatcgacagcagggttgtgtcaattatgcagtcatcgcgtcgggatggaggattgtacagtgcctgagcctgaagtttttaactggatcccccgtgaggggatggagacgacacgaaagccatcagttattacggtaaagtttggtgacggatatgaacagcgacgggctggtggtctgaatgcggatctgaaaacgtttaaaccggtatttcgtgtcacagatgaatattcccgtgccgcgctggacagttttttatcccgtcatgccgggattcgtgcttttttgtggcgtccgccaaaacacaacaggactgtccgggttgtctgcagggagtggagcatttcggataatgccatgtataccgattttaactgtacctttgaagaggtcactcactgatgcaggatatacagcaggaaacactcaatgagtgcactaaaacggagcaatccgcgctggtcgtgctctgggaaattgatctgacagaggtcggcggagatcgttatttcttctgtaatgagcagaacgaaaaaggtgaaccagtcacctggcaggggcggcagtatcaggcttatcccattcagggaagcggatttgagatgaacggcaaaggagccagtgcaaggccaacgcttaaagtctctaatctgtacggcatggtcaccgggatggcggaagatctgcagagtctggtcggcggaacggtggtccggcgtaaggtttacgcccgttttctggatgcggtgaacttcgtcaacggaaacagtgacgccgatccggagcaggaggtgatcagccgctggcgcatcgaacagtgcagcgaactgagcgcggtcagtgcctcttttgtgctgtccacaccgacggaaacggatggcgctgtttttccggggcgcatcatgctggccaacacctgcacctggatctaccgcggcgatgagtgcggttatgatggcccggcggtcgcggatgaatatgaccagccaacgtccgatatcacgaaggataaatgcagcaaatgcctgagtggttgcaagttccgcaataacgtcggcaattttggcggctacctttccattaacaaactttcgcagtaaacccatgacagagacagaatcagcgattctggcgcacgcccggcgatgtgcgccagcggagtcgtgcggcttcgtggtgagaacgccggagggggacagatattttccctgcgtgaatatctccggtgagccggaggcgtatttccggatgtcgccggaggactggctgcgggcagagatgcagggtgagattgtggcgctggtccacagccaccccggtggtctgccctggctgagtgaggccgaccggcggctgcaggtgcagagtgatttgccgtggtggctggtctgccgtggggagattcataaattccgctgtgtgccgtatctcaccgggcggcgctttgagcacggggtgacggactgttacacgctgttccgggatgcttaccatctggcggggattgagatgccggattttcatcgcgaggatgactggtggcgtcacggtcagaatctctatctggataatctggaggccacagggctgtatcaggtgccgttgtcagcggcgcagccgggcgatgtgctgctgtgctgttttggttcatcggtgccgaatcatgccgccatttactgtggtgacggcgagctgctgcaccatattcctgaacaactgagcaaacgagagaggtataccgacaaatggcagcgacgcacacaatccctctggcgtcaccaggcatggcacgcatctgcctttacggggatttacaacgatttgtccgccgcatcgatctgcgtgtgaaaacgggggccgaagccatccgggcgctggccatgcagatcccggcgtttcgtcagaagctgagcgacggctggtatcaggtacgcattgccgggcgtgatacaggtgaaacggaattatcagcccgtcttaatgaaccgctggcaaatggtgctgtgatccatatcgtgccgcgtctggcaggagccaaaagtggcggtgtgtttcaggctgtgctgggggcggctgttatggcggttgctatatggatgccgggggtaggaattatggcgagtaatctgctgttttctctcggtgccagtatgacgcttggcggtgttgcacagatgctggcccctaaacccaaaaccccccgcacacagacaacggataacggcaaacagaacacctatttttcttcactggataatatggttgcccagggcaatgttctgcccgttctgtacggtgaaatgcgcgtgggatcacgtgtggtatctcaggagatcagcacagcagatgaaggtgatggtggtcaggttgtggtgattggtcgctgatgaaaaacgttttatgtgaaaccgcctccgggcggttttatcgtttatggagcatgacgaatgggtaaaggcagcagtaaggggcataccccgcgcgaagcgaaggacaacctgaaatccacgcagctgctgagtgtgattgatgccatcagcgaagggccgattgaaggtccggtggatggattaaaaagcgtgctgctgaacagtacgccagtgctggacagtgaggggaataccaacatctccggcgtcacggtggtgttccgggccggtgagcaggagcagacaccgccggagggatttgaatcctccggctccgagacggtgctgggtacggaagtgaaatacgacacgccgatcacccggaccatcacgtcggcaaacattgaccgactgcgttttaccttcggcgtgcaggcactggtggaaaccacctcaaagggggacaggaatccgtcggaagtccgcctgctggttcagatacagcgtaatggtggctgggtgacggaaaaagacatcaccattaagggcaaaaccacctcgcagtatctggcctcggtggtggtgggtaacctgccgccgcgcccgttcaatatacggatgcgcaggatgacgccggacagcaccacagaccagctgcagaacaaaacgctctggtcgtcatacaccgaaatcatcgatgtgaaacagtgctacccgaacacggcactggtcggcgtgcaggtggactcggagcagttcggcagccagcaggtgagccgtaattatcatctgcgcgggcgtattctgcaggtgccgtcgaattataacccgcagacgcggcaatacagcggtatctgggacggaacgtttaaaccggcatacagcaacaacatggcctggtgtctgtgggatatgctgacccatccgcgctacggcatggggaaacgtcttggtgcggcggatgtggataaatgggcgctgtatgtcatcggccagtactgcgaccagtcagtgccggacggctttggcggcacggagccgcgcatcacctgtaatgcgtacctgaccacacagcgcaaggcgtgggatgtgctcagtgatttctgctcggcgatgcgctgtatgccggtatggaacgggcagacgctgacgttcgtgcaggaccggccatcagataaggtgtggacctataaccgcagtaatgtggtgatgccggatgatggtgcgccgttccgctacagcttcagcgccctgaaggaccgccataatgccgttgaggtgaactggattgacccgaataacggccaggagacggcgacagagcttgtggaggatacgcaggccattgcccgttacggtcgtaacgtcacgaaaatggatgcctttggctgtaccagccgggggcaggcacaccgagccgggctgtggctgattaaaacggagctgctggaaacgcagaccgtggacttcagcgtgggtgctgaagggcttcgccatgtgccgggcgatgtcattgaaatctgcgatgatgactatgccggtatcagcaccggtggtcgcgtgctggcggtgaacagccagacccggacgctgacgctcgaccgtgaaatcacgctgccatcctccggcaccacgctgataagcctggttgacggaaatggcaatccggtcagcgtggaggttcagtccgtcaccgacggcgtgaaggtgaaagtgagccgggttcctgacggcgttgctgaatacagcgtgtgggggctgaagttgccgacgttgcgccagcgcctgttccgctgtgtgagtatccgtgagaacgatgacggcacgtatgccatcactgccgtgcagcatgtaccggaaaaagaggccatcgtggataacggggcgcactttgacggcgaccagagcggcacggtgaatggtgtcacgccgccagcggtgcagcacctgaccgccgaagtcaccgcagacagcggggaatatcaggtgctggcgcgctgggacacgccgaaggtggtgaagggcgtgagcttcctgctccgtctgaccgtaacagcggatgacggcagtgagcggctggtcagcacggcccggacgacggaaaccacataccgcttcacgcaactggcgctggggaactacaggctgactgtccgggctgtaaatgcgtggggacagcagggcgagccggcatcggtatcgttccggattgccgcaccggcagcgccgtctcggattgagctgacaccgggctattttcagataaccgccacgccgcatcttgcggtttatgatccgacggtacaatttgagttctggttctcggaaacgcggattaccgatatcaggcaggttgaaaccacagcccgctaccttggcacggggctgtactggatagccgccagtatcaatatcaaaccgggccatgattattacttttatatccgcagtgtgaacaccgttggcaaatcggcattcgtggaggccgtcggtcgggcgagcgatgatgcggaaggttacctggattttttcaaaggcaagataaccgaatcccatcttggtaaagagctgctggaaaaagtcgacctgacggaggataacgccagcaaactggagcagttttcgaaagagtggaaggatgccaacgataaatggaatgccatgtgggctgtcaaaattgagcagaccaaagacggcaaacattatgtcgcgggtattggcctcagtatggaggacacggaggaaggcaaactgagccagtttctggttgccgctaaccgtatcgcgtttattgacccggcaaacgggaatgaaacgccgatgtttgtggcgcagggcaatcagatattcatgaacgacgtgttcctgaaacgcctgacggcccccaccattaccagtggtggaaatccaccggcattttccctgacaccggatgggcggctgacggcgaaaaatgccgatatcagcggtaacgtgaatgcgaactccgggacgctcaacaacgtcacgattaacgagaactgtcgggttctgggaaaactgtccgcgaaccagattgaaggcgatctcgttaaaacagtgggcaaagctttcccccgggactcccgtgcaccggaacggtggccatcagggaccattaccgtcagggtttatgacgatcagccgtttgaccggcagattgttattccggcggtggcattcagcggcgctaaacatgagagagagcatactgatatttactcctcatgccgtctgatagtgcggaaaaacggtgctgaaatttataaccgtaccgcgctggataatacgctgatttacagtggcgttattgatatgcctgccggtcacggtcacatgacgctggagttttcggtgtcagcatggctggtaaatgactggtatcccacagcaagtatcagcgatttgctggttgtggtgatgaagaaagccaccgcaggcatcagtatcagctgaattttataacccatatacgggcgccagaaatggcgccttttttattgcagaaaagcgagaggtaattatgcgtaaagtttgtgcagccattttgtccgcagccatctgtctgtccgtatccggtgcgcctgcatgggcgtctgaacatcagtccacactgagcgcagggtatcttcatgcccgtacgaacgctcccggcagcgataatctgaacgggattaacgtgaaataccgttatgagtttacggacacgctggggctgattacgtccttcagttatgccaatgctgaggatgagcaaaaaacgcactacagcgatacccgctggcatgaagattccgagcgtaatcgctggttcagcgtgatggcggggccgtctgtacgcgtgaatgaatggttcagcgcgtatgcgatggcgggtgtggcttacagccgtgtgtcgactttctccggggattatctccgcgtaactgacaacaaggggaaaaagcacgatgtgctgaccggaagtgatgacggtcgccacagcaacacgtctctggcgtggggagctggcgtgcagtttaacccgaccgaatccgtggccattgatgtcgcttatgaaggctccggcagtggtgactggcgcactgacgggttcatcgtgggtgttggttataaattctgattagccaggtaacacagtgttatgacagcccgccggttcaggcgggcttttttgtggggtgaatatggcagtaaaaatttcaggtgtactgaaagacggcacaggaaaaccggtacagaactgcacaatccagctgaaagcaaaacgtaacagtaccacggtggtggtgaacacgctggcatctgaaaatccggatgaagccgggcgttacagcatggacgttgagtacggtcagtacagcgttattttgttggtggagggattcccgccgtcacatgccgggaccatcaccgtgtatgaagattctcaacccggtacgctgaatgattttctcggtgccatgacggaggatgatgcccgtccggaggcactgcgccgctttgaactgatggtggaagaggtggcgcgtaacgcgtccgcagtggcgcagaacacagcagccgcgaagaagtcagccagcgatgccagcacatcagcccgtgaggcggcaacccatgcgactgatgctgcaggctcagcacgtgcagccagcacatcagccgggcaggccgcgacgtcggctcagtcagcgtcttccagcgcaggaacggcatcaacaaaggctactgaagcatcaaaaagtgctgccgctgcagagtcctcaaaaagcgcggcagctaccagtgccagtgccgcgaaaacgtcagaaacgaatgcggcagcgtcacaaaaatctgcagccacttctgcatccaccgcgaccacgaaagcgtcagaagctgccacctcagcccgggatgcggcggcctcaaaagaggcagcgaaatcatcagaaacgagcgcagcctcgagcgccagcagcgcagcttcctcggcaacggcggcaggaaattccgcgaaggcggcaaagacgtccgagacgaacgccaggtcttctgaaacggcagcgggacagagtgcctcagctgcggcaggctcaaaaacagcggctgcatcatctgccagtgccgcgtcaacaagtgccgggcaggcctcagccagtgccaccgctgccggaaagtcggcagaaagtgccgcatcgtctgcttcaacagccacaacgaaggctggcgaagccactgaacaggccagcgcagcagcgaggtcagcttccgcagcgaagacatccgaaacgaacgcgaaagcgtcggaaacccgtgcagaatcctcaaaaacggctgccgcatcgtcagccagttcggcggcgtcatcggcatcatcggcgtctgcttcaaaagatgaggcgaccagacaggcgtcagcagcgaagggcagcgccacgacagcatccacgaaggcgacagaggcagctggcagtgcgacggcggcagcacagagcaaaagtacggcggaatccgcggcaacgcgcgccgagacagcggcaaaacgggcagaggatattgcatccgccgtggcgcttgaggatgcgagcacgacgaaaaaggggatagtacagctcagcagtgcgaccaacagcacgtctgaaacgctggcggcaacgccaaaggcagttaaaactgttaaagatagttcagttcaaaaaactggcgacacaatgggagggcagttaaaaatcagcacgataaatgctcttcgaatattcaaccaagcctttggccttatttttaggcgttccgaagatcatcttcatcttattccgactaatgaaggggagggggaaaatggagacatcggttcattaagaccattctctataaacttaagatcagggttggtgtccatcggtaatggactaaaagttggtggtagtgttactggtaatttgaccggaaacgcagatactgcgaccaagatcaagacagcacgtaagattgggggcgtggcatttgatggatcggcagatatcaacttgcctggagtcaacgctaccggtaatcaaaacactacaggtaatgctgcgaccgccacgaaacttcaggcagccagaacgattaacggtgtgtcatttgatggtagtgcaaatatcacattgaccccttcaaatattggggcattggcattaactggagggactctttcaggtggtttaactgctgctggtgaggttatttcaaggtcagcaaatggtctgcgtattgcctatggcaactatggattctttatccgaaatgatggattaaacacatattttatgttgacagattcgggtaacaggcttggtacgtacaatagcttaaggccgtttataattagtaaccatactggcaatgttacaattgcaactaaattaaacgcgagtggtggtatcactggatctttatcgggtaatgcaagcacagcaaccaaattgcaaactgcaaggacaattaacggcgtaaaatttgacggctcggcaaatattgaagcgtttccgccaggtgttccgctgccgtggccatcagatacaccacctgcaggttatgcaatcatgcaggggcagacgtttgataaggcagcatatccgaaactggctattgcctatccttcaggtgttattccagatatgcgcggctggacaatcaagggcaaacccgccagtggtcgggccgtattgtctcaggaacaggacggcattaaatcgcacacccacagcgccagcgtatccagtacggatttggggacgaaaaccacatcgtcgtttgattacggcactaaatccacgaataacactggtgcgcatacccatagtgttagcggtacggctgcttcagccggtgcacatacccattcgatgacatttgtttcaggtggttccagtggtgctccgggaagtggatcacctgattattactaaatacagtgttaacacttcttctgcaggcgctcatacgcactctgtatcgggtactgctgcaagcgcaggtgcacacgcacatactgtcggtattggtgctcatacgcactccgttgcgattggttcacatggacataccatcaccgttaacgctgctggtaacgcggaaaacaccgtcaaaaacatcgcatttaactatattgtgaggcttgcgtaatggcattcagaatgagtgaacaaccacggaccataaaaatttataatctgctggccggaactaatgaatttattggtgaaggtgacgcatatattccgcctcatacaggtctgccagcaaacagtaccgatattgcaccaccagatattcctgctggctttgtggctgttttcaacagtgatgaggcatcgtggcatctcgttgaagaccatcggggtaaaacggtttatgacgtagcgtcaggggacgagttatttatttctgaactcggtccgttaccggaaaatgttacctggttatcgccggaaggggagtttcagaagtggaacggcacagcctgggtgaaggatacggaagcagaaaaactgttccggatccgggaggcggaagaaacaaaaaacaacctgatgcaggtagccagtgagcatattgcgccgcttcaggatgctgcagatctggaaattgcaacggaggaagaaacctcattgctggaagcctggaaaaagtatcgggtgttgctgaaccgtgttgatacatcaactgcacctgatattgagtggcctacgaaccctgtcagggagtaatcattgggattatgccgcagcacgtcttaagcaagaacgtgctgcggttggatgctattttttccctgaagcggaaaacattactacagtaccttgaaccttggttttaacattctcgaaatgctctgagagtatatgtgttaagccttcttcggaatcttttgtgtttgaaaagatgcctttctgattgtaaatgcgcatcagtttttgaccgaagctattgtgcacaactccatcgccaagaattgtggctccgtatagagttccatcgtcagttaaggcctgcgccgcattgcgtattacacagctttttgtagatatatttccaggcaggcagtgaagaaggtaaaacatggaaatggaatcaaattgaccatgtaacgccgcgggataaggttcaaaaacatcatggctaattttatgtttaatttttgattccccagcccttgtcgatgccgcgttcaggctagcttcgttcaaatccattaaagatatcagactactctcaggtacgtgagtaaggtaaaacccagttccaacaccaatatccagatggttgttacctacatgttccagaaagtgtggaagaaggtgttcctttgtaggacatccccatgcaagccgatttgatactcccaaaacccaccagtcataaagctttagggtaagtggtgtgtaaattttagccccatcatctgtgttttttttcattgatttcaccatgttatagttttatttgtgaattaaatcaattatggcgatgaattacaaggggttaaatgctgccgcagcatagcgatattgaaatagcctggtatgcttcgatacagcaggagccgaatggctggaagaccgtcaccacacagttctacatccaggaattcagtgagtatattgcgccactgcaggatgctgtagatctggaaatcgcaacggaggaagaaagatcgttgctggaggcatggaataaatatcgggtattgttgaatcgtgttgatacatcaactgcacctgatattgagtggccgacttcacctgcagagtaatcaacggcgcagggatgatattttgtgcttgaagtgcctccccgaccattcagatagtcggggagggggtattgggattatacgcaatcagttttagtaaaagaccgaagctctcgaaaaatctttctccaaaaccagaatgcaattgattgattttgataggatctataacgccgttaccttaaacggcaaaaccactcaaaaacaaacctaatgtattgaatataaaggattaatcatctaattcgctcaccttcttattcagcagacgagaagcgcgccagtaaaccagcaacatcaggcccattacgatagtcagcgtaatgctggtggctgcaccaaacggccagtcacgaatattgaggaactgtaccttgatgacgttaccgatcagcaggtttttcgcaccgcccatcaggtcggacacatagaacaggcccatcgctggcagcatcaccagcagacatccggcaataattcccggcatcgtcagtggaataatgatacggataaaagtctgtaacttgctggcaccgagatcgcgcgccgcctcaagcaacggcttatccagtttttcgatactggagtacagcggcatcaccataaacggtagcagaatgtaaaccagaccgataatcaccgcactgggcgtgaacatgatacgaattggtgtgtcgataacgcccagccagagcaaaaactcgttgagatagcctttggtgctgaggaaaattttcagcccgtagatgcgaatcagtgagttggtccagaagggaacaatcagcagaaacagcagcagcggacgcaccttgtgtggcagcttcgccagaaaccaggcaaacgggtagcccagcaccaggcaggcgagggtggcgatcagcgccatattcagcgagtgcaatagcacttcaaaatagagcggatcgagcagacgcgtgtagttatccagcgtaaagaccattttgacgaaactggcgtcgtcgcgggtcaaaaagctggtgccaatgatcatcaggttgggcagaaagacaaacaacacaagccaaccgacaatagtgacaatcactacattctggaacttacttgtgttcttcatcagccagtacgacctcccagctttctacccaattaatggccattttttggtcgagagagtggtcaaagtcagggtcgtcttcattgaagaattcgctgaccatcaccatcttgccattttccagttcaacaaccgactccagcgtcatgcctttgtagttacgctcacgaacgtaaccaatcagcccttcagcgtggttgtcgtcgttaatctcttcaacacgtaagtcttccgggcgcagcagaacatgcagtttttgccccggttcaacggcgaagttaacgtagatattacattcgcggccttcaacgttggcgcgtacgcgctgctcgtctagacgttcgatgacagtggcgttaaacatattgatttcgccaatgaagccggcaacaaacaggtttttcggctcttcgtaaatttcgcgcggtgtaccatcttgctcaatacgaccctcgcgcatcaccacaatcctgtctgacatggtgagcgcttcttcctgatcgtgagtgacaaagacgaaggtaataccaagcttacgctgtaacgctttcagctcgttctgcatttgcttacgcagtttgtaatccagcgctgagagcgactcatccagcaacaacagacgaggcttgttaaccaccgcgcgagcaatggcgacgcgttgctgttgaccaccagagagctgatgcggtttacgttgagcgaaggtttccagttgcaccatccgcagggcttccatcacgcggggcgtaatttcagcagcgggggttttttgcatgcgcaacccaaaggccacattttcgaacacggtcatgtgggggaaaagtgcgtagctttggaaaacagtgttcacatagcggttttccgccggaacgtgggtgatgtcctcgttatccagcatgatgcgtccggaatcaacagtttccagacctgcaatcaggcgaagaacggttgttttaccgcagccagaagggccaagcagcgtgaggaactcgccattgttgatagtcagatccagctggggaatgacctctttaccatcaaagcatttgcgaattcccgccaattgcaccagcggtgaaagcgaactcggttgtttattcaattttttactctgtcccatgtaaacgcaacggatggcttaccgatgcggggtttgtggttaaccaccttggtgactcttaatgagggcggtaattctacggcaaaccgcttgaatcgccaatctttgttgtgaattactggcttagctttatattcattaaggtaatgctgataaatattcccgcttgcaggggtaaaagtgacctgacgcaatatttgtcttttcttgcttcttaataatgttgtcacaaaaagtgagggtgactacatggataaactacttgagcgatttttgaactacgtgtctctggatacccaatcaaaagcaggggtgagacaggttcccagcacggaaggccaatggaagttattgcatctgctgaaagagcagctcgaagaaatggggcttatcaatgtgaccttaagtgagaagggcactttgatggcgacgttaccggctaacgtccctggcgatatcccggcgattggctttatttctcatgtggatacctcaccggattgcagcggcaaaaatgttaatccgcaaattgttgaaaactatcgcggtggcgatattgcgctgggtatcggcgatgaagttttatcaccggttatgttcccggtgctgcatcagctactgggtcagacgttgattaccaccgatggtaaaaccttgttaggtgccgatgacaaagccggtattgcagaaatcatgaccgcgctggcggtattgcaacagaaaaacattccgcatggtgatattcgcgtcgcctttaccccggatgaagaagtgggcaaaggggcgaaacattttgatgttgatgccttcgatgcccgctgggcttacactgttgacggtggtggcgtaggcgaactggagtttgaaaacttcaacgccgcatcggtcaatatcaaaattgtcggtaacaatgttcatccgggcacggcgaaaggagtgatggtaaatgcgctgtcgctggcggcacgtattcatgcggaagttccggcggatgaaagcccggaaatgacagaaggctatgaaggtttctatcacctggcgagcatgaaaggcaccgttgaccgagccgatatgcactacatcatccgtgatttcgaccgtaaacagtttgaagcgcgtaaacgtaaaatgatggagatcgccaaaaaagtgggcaaagggttacatcctgattgctacattgaactggtgattgaagacagttactacaatatgcgcgagaaagtggttgagcatccgcatattctcgatatcgcccagcaggcgatgcgtgactgcgatattgaaccggaactgaaaccgatccgcggcggtaccgacggcgcgcagttgtcgtttatgggattaccgtgcccgaacctgttcactggcggttacaactatcatggtaagcatgagtttgtgactctggaaggtatggaaaaagcggtgcaggtgatcgtccgtattgccgagttaacggcgcaacggaagtaagcgaaaagggatgcggcatgtgatgccgcatccggcttaaatccaaacttacccttcgaagaaccagtatccgctattgaccagcgccgcgagcatcgcgaggaatgacggatcttccagcgcatcgccaaaattctccgcggtcagcgcaatgttgctggcgagtgcatccagtgccggacggtgcggggaatcgatcttctcaccattggcatacacgtcgtcgccaatgcgcaatacgcgcagaccacccaggcgcaccagcacatcaccttgtttcagcgcatcgtagatttcatctggctgataaggcggttccggcggcgcgatatccagttcatgacgtgactgggatataaactcgccaaaccattgcttaaagtgttccggctggttgatcaattcgagcatcatctcacgcagtttatccatttcttgcggcagaacgtccgcaggatgagcgcgaggtggaacatccggatcgctgtagtagttgccgcccagttcacgttgcagcacataatcggcaaatccgctaattaattcccgcgtatttggcgcgcgaaaacccacggaatagttcatcgcattttccagcgcgtagccttcatgcgggaatcctggcggaatataaagaatatcgccaggctccagctcttcatcgatgatggcttcgaacggatcgacctgtaacagatccgggtgtgggcagtgctgtttcatttgcagcttttcgcccactcgccagcgacgacgtccggtaccctgaatgataaacacgtcgtactgatcgagatgcgggccgacgccgccgccaggtacagaaaaagagatcatcagatcatcaatacgccagtccggtagttcacggaacggtcgcatcagcgcggcggtcggctcatgccagtgatttactgcttgcactaacaatgaccagttagtttcaccgagatgatcgtagctttcgaacggaccgtggctgacctgccatttgccatcctggtgactgaccagtcgactgtcgacttcgctttccatcgccagacccgccaactcgtctggagagatcgggtcaataaaattattaaagccgcgttttaacaccaccgggcgtttctgccagtgacgttcaagaaaatcgggccagttaagagtgagttggtattccatgttaagcatccacaggctggtatctgcaaccgattataacggatgcttaacgtaatgcgtgaagtatggacatatttattcatctttcggcgtagaatgctggcgaccaaaaatcacctccatccgcgcaccgccaagcatgctatctccggcgacgattttaccctcatattgctcggtgatttcgcgggctaccgccagccccacaccttgcccagggcgtaaagtatcaacccgttgaccacggtcgaaaatgacctctcgcttgcttaatggaataccggggccatcatcctcgaccacaatatagagatgctcgtcggtttgccttgcagaaatttcgacaaactcgaggcaatatttacaggcattatccagcacgttgcccatcacctcgacaaaatcgttctgctcaccgacaaagctgatctctggcgaaatatcgagagagatattgacccctttgcgttgatacactttgttcagcgctgaggtgagattgtccagcagtggggcgaccggatgcagctcgcggctgagcaatgtcccgccgcgcatactggcacgatgcaggtagtagccaatttgctgtgaaatgcggctgatttgctccagcattaccggctcagcatcactgacgctcatcttttcactacgcagagaacgcagcgtactttgcagcaccgccagtggcgttttcagactatgggtcaggtcggtgagcgtcgtacggtatttgtcgtaacgttcgcgttcactttttaacaatcggttcaggtttcgtaccagactggtcagttctcgcgttgtggctggattgagcaattcgcggttatgttcttccagttcgcggacttcttttgccagggcttcgatggggcgtaaactccaccaggcggcgacccacagcagcgggatcactaacagcagattggctgagagcacatagataaaccagctccagaccatataggaactttttagctccaccggaatggtatccaccaccacaatggttaactttggcattcgcgatgttgccgggtagacgtttaccgccaccgagtgggtcatctccgcgtcgtcgtcatcttcccgcacttcctgcaactgttgctgtatcgaatgatctccactcagcaagaggctggtatcgttaacatccgcttcaatttcatgaaaaccattcgatttcagccagtcaggctggatcatcttcatcagccagggcacgtcacgttgcgcccataaaagctgcccgttctcatcataaattagcgtcatggtggggctttgcttgtcgatattttctggtaactcgacatgcaacttattgttttcccacttcgcaagggtatagaacagattgctttcgccacgtaacagccgaaacgtagttttatcgaaactgacgctataaccgatcagcgcgaccattccgtaggcaagcgaaagcaccagtactaccgctgccgttgccaacagaaaacgtacccgcagcgagagcgggaaaaaaagacgcagtaattttttcatcagcgcaattcgaacagatagccctggccgcgaacggtggtaatcacttcttgcggatattgtgcctgaatttttttgcgcagacgtcccatcagtacatcaatggtatggctttcccgcagctccgcatccggatagagttgtagcattaacgaatctttgctcaccactttgccattattgcgtatcaacgtttccataatggtgtattcgaacgcggtcagtttgatcacttcgtcattaatagataattcacggcgagagagatcaacctgaaacggggggagcgaaatgacctgtgaagccagaccgctattacgccgcattaatgcctgcattcgcgccatcatctcttcaatatgaaacggtttagtcacataatcatcagcaccggcacttaatacttcgactttgtcctgccagctttcacgggcggttaataccagaatcggcagtgaaacatcattgctacgccagcggcgaatcagtgacagaccgtcctcgtctggcaatccgagatcgacaatcgcaatatccggtaaatgttcattgagataataatcggcttctttggcatcttctgcgtcatcgacctgatgaccagcatcctgaatctgaactttaaggtggtgacgtaacaacgcattgtcttcaacaaccagtacgcgcatttttatttctccctgtcttaattattaaaatagtgtaacgcgattatgtgtttatgggggtaaacattaaataaaccagcggggaggggaggtaaagtgaaaaaagaaaaagtggataatcttaataagcaggccggacagcatcgccatccggcactgatacgagtttatttcagctcatcaaccatcgtgatagctcgaccaatatagttagccggcgtcatcgctttcaggcgggctttctcttcttctggcaacgccagaccgtcgataaactgcttcatgccttcggcgtcaacgcgcttaccgcgagtcagctctttcaatttctcgtacggtttttcgatgccatagcgacgcataactgtctggattggttctgccagcacttcccagttgtgatccagttcatccagcagatggtcacggttcacttccagtttgctcacgcctttcagggtggattgatacgcaatcagcgcataaccgatacctacgccgaggttacgcagcacggtggagtcggtcaggtcacgctgccagcgggaaaccggcagtttgcttgccagatgctgcaataccgcgttggaaaggcccaggttcccttcggagttctcgaagtcgatcgggttaactttatgcggcatggtggaagaaccaatctcaccggcgatggttttctgtttgaagtggttaagggcgatataaccccagacgtcacggtcaaagtcgatcagaatggtgttgaagcgcgcaacgcaatcaaacagttcggcaatgtagtcgtgcggttcaatctgggtagtgtacgggttccattgaatacccagcgaggtgacgaactcttcgctgaactgatgccagtcaacttccgggtaagcggcgatgtgggcgttatagttaccgaccgcgccgttgattttgccgaggatctccacctggttaagctggcggtactggcgctccatacggtaggcgacgtttgccatctctttaccgatggttgacggcgtggctggctgaccgtgggtacgagacagcagcgggatatcgcggtactgaacggcgagatctttaatgccatcaatcagttgacgccagtacggcaggatcacttcatcacgcgcggttttcagcattaatgcgtgggagaggttattgatatcttccgaagtacaggcaaagtggatgaattcagaaaccgcgtgcagttccgggatctccgccactttttctttcaggaaatactcaaccgctttaacgtcgtggttagtagtacgctcgatggttttgatgcgtgcggcatcttcttcgctgaaattggcgacaattgcatcaaggtaaccgattgcgtcggcagcaaaagcaggaacttccttgatcgctgcgtgcgcggccagtttttgcagccaacgtacttcaacttgtacacggaatttcagcaaaccatattcgctgaaaatcccgcgcagcgcgctgactttatcgccgtagcgtccatcgacaggggaaacggcggtcagtgaggataattccatagatcacaactccggggttaaatgagcaagaatttgttttgcctgagtggtcaggcgattacgagaaaacatcagttgcagacgtccgccgccgacctggtgccagagcacggcggcgcgaatgcctgccagcagggttgcgcgaactttcgcctgcacttgtgggctttgcagtacagcaggggaaccggtgacctgaatgcgcgggccaagcgggctaatcacatcaacatagatagcagccatcgcgctcatcagcgtttcggactgtaaatcgaagtgttcgagctggcgttgcaggccgttgatccggttgcccagagtgtcgagcgcacctttcgctgaggagagtttgcgctcaagcaccatcaggctgagtgtgtagcgggttaactcagcgtttaagccctggcgactgctggcattgagcacgccgagcaaggtttccagcccgacgcgcaggttggcttcgctaccgccaaaaaccgccagcgtcgagctggggttcatatcaataatactgttgagtgagacgtgtagcgcatcggcatcacaatgcccctggtgagcgagttgttgcaccaggcgtgccgactgacaaataccggccagggcgagggtgatgtcatagtaattctttgccacgttcactgcttccttgttttaagtaaagataataatcagaccggcagcggcagacgctgctcaataataccgccaccgaggcacacttcaccgttatagaagacggcagactggcccggcgtcacggcggcaaccggttcatcgaaaatcacttcaatgcgatcatcgtccagcgccttgacggtgcaagggatatcggtctggcgatagcgggtttttaccgtgcaacgcatagtgccggtgaatggttcgcgatcgacccagtgcaactgctgggcaatcaacccgacagacatcagccgcgggtgttcatggccctgagcgacaaccagaatgttgttttcgacgtctttgtccaccacataccacggttcttcggtaccttctttggtgccaccgatacccagacctttacgctgaccgagagtgtgatacatcagcccctggtgctcaccaatttcatcgccatcgacggtaatgattttgcccggttgcgccgggagataacggcccaggaactcgcggaatttacgttcgccaatgaagcaaatgccggtagagtcttttttcttcgcggtgaccagaccaagatcttcagcaatcttacgcacctgcggtttttccagttcgccgaccgggaacaggctttgcgcaatctgctcatggctgagcgtataaaggaagtagctctggtctttattgctgtccagaccacgcagcaggcggctcttgccatcgacatcggcccgacgtacgtaatgaccggtagcgatataatcggcacctaaatcttcggcggcaaattcgaggaaggctttaaatttgatctctttgttgcacagaatatccggattcggcgtgcgaccggctttatattcggcaaggaacagttcgaagacgttgtcccagtactcggcagcaaagttaacggtgtgcagttcaatgccgagcttgtcgcagacagcctgggcatcagccagatccgctgccgctgtgcaatattcctcaccgtcgtcttcttcccagttcttcataaacaggccttcaacctgatatccctgttgttgcaacagccaggcagaaacggaggaatcgacaccgccggacatgccgacgattactttttttgcggtttcagacattggatcactcacgacattgaacttcaaggcggcgtattctatcacgcagccttttagatgacaccctttgtaaaaggccagttaaaatcgccaatcatctccagcggatagcgttgcccgctttgataacaacggatactttccgccaccagcggcgaacgaagatttgacgcctgtaaaatttcttcggcgctgacccaacgacagcagtcgatatcgctgtcatgaggctgggtcgagcatatttgctcaagctcaatggcaaagaggaaacgcaaaaacggcgttttatctggcgcaatccactgatgcatacgaataaagtgttgcggttgcgcgctgatgccggtttcttcccatagctcacgggcggcagcttccactaaggtttcatcggcttccagatgcccggcaggttggttccataacgctttaccattaatcgtctcttcaacgactaaaaatttaccctctgcgtgcactacgcaagcaacggtaacgtgcggtttaaacattgtgcatccttattctgttgcttctcgccattcgccattggcaaggttatccaaagtgtaatcacccatcgcataacgaatcagtcgcagcgtggggaagccaacatgggcggtcatgcggcgcacctggcgattacgtccttcatataaggtgatcttcagccagctggtgggaatacttttgcgttcacgaattggtggattccgcggccataaccacgcgggttcgtcaaccagctccgcgcctgcgggcagggtagggccatcatttaaggttacgccattgcgcaaggcttcaattgcgtcttgcgtgggaaaaccttccacctgcacataatagatttttccggtgcgtttacccggctgggttaaacgcgcctgcaacgcgccgttattggtcagcaccagtaacccttcgctatcgcggtcaagacgacctgctgcataaacgccctgaaccgggatgaattcttttaatgttttgcgtccggcttcatcggtgaactgcggaagaacatcgtagggtttattgaagaggatcacacgcgtgggctggttttcaggtttacgcctggtagaacgttgcgagctgaatcgcttaacctggtgatttctaaaagaagttttttgcatggtattttcagagattatgaattgccgcattatagcctaataacgcgcatctttcatgacggcaaacaatagggtagtattgacaagccaattacaaatcattaacaaaaaattgctctaaagcatccgtatcgcaggacgcaaacgcatatgcaacgtggtggcagacgagcaaaccagtagcgctcgaaggagaggtgaatggaaagtaaagtagttgttccggcacaaggcaagaagatcaccctgcaaaacggcaaactcaacgttcctgaaaatccgattatcccttacattgaaggtgatggaatcggtgtagatgtaaccccagccatgctgaaagtggtcgacgctgcagtcgagaaagcctataaaggcgagcgtaaaatctcctggatggaaatttacaccggtgaaaaatccacacaggtttatggtcaggacgtctggctgcctgctgaaactcttgatctgattcgtgaatatcgcgttgccattaaaggtccgctgaccactcctgttggtggcggtattcgctctctgaacgttgccctgcgccaggaactggatctctacatctgcctgcgtccggtacgttactatcagggcactccaagcccggttaaacaccctgaactgaccgatatggttatcttccgtgaaaactcggaagacatttatgcgggtatcgaatggaaagcagactctgccgacgccgagaaagtgattaaattcctgcgtgaagagatgggggtgaagaaaattcgcttcccggaacattgtggtatcggtattaagccgtgttcggaagaaggcaccaaacgtctggttcgtgcagcgatcgaatacgcaattgctaacgatcgtgactctgtgactctggtgcacaaaggcaacatcatgaagttcaccgaaggcgcgtttaaagactggggctaccagctggcgcgtgaagagtttggcggtgaactgatcgacggcggcccgtggctgaaagttaaaaacccgaacaccggcaaagagatcgtcattaaagacgtgattgctgatgcattcctgcaacagatcctgctgcgtccggctgaatatgatgttatcgcctgtatgaacctgaacggtgactacatttctgacgctctggcagcgcaggttggcggtatcggtatcgcccctggagcaaacatcggtgacgaatgcgccctgtttgaagccacccacggtactgcgccgaaatacgccggtcaggacaaagtaaaccctggctctattattctctccgctgagatgatgttacgccatatgggctggactgaagccgcagacctgattgttaaaggtatggaaggcgcaatcaatgcgaagaccgtaacctatgacttcgagcgtctgatggaaggcgctaaactgctgaaatgttcagaatttggtgatgcgatcatcaagaacatgtaatcactacatgtgtttaatattgcaacgggcgtataacacgcccgttgttatatttatgtaggtattattaatagcatatcgagcatatttatataaaaccctttacttgagcccatatgggcatatttttataatgcaactattatgcaaacatttatttgttattttgctttctcctggaggacactcttgactgcttttgagtagactccataaatccttgttgaatggtgcgatgttataaatagtaataggatattctttatctttaaggataattccagatttaaccggtgtaaatatactgccaggagggagaaatatagtagattgataccagatgatcattttcatattaccccatatggctgaaaaagatatgccgcatgaaggttgaattatcgtgtcaattactatccacttcatttgttatgtcttatcccacggtatttaatatagttcatttggatgttcatttctttattttgcatatgagtatattaccccttcaaaaaataaattaattaaaacgattgcttatataaaacaaaatttaaagcaaggaatctcaatggatgttaaacaaaatgagatttagtgaaaacaataaattattcacttcgttttagatttgtttagctataatgttatacattcaaatgactgaacatcctgtaattaaaacatagcctttatgctactttgtgccaatttgctaaacattatggttgcctttttatataacgataataatgaatataagcatgacatgagaataaggtttcaatttttgagttatataggaaaggtttaacctgttcctggctaaaatacatataaccggatgatgactaaaccaaaatacatgtgcgttaagtattgaaacggacgtgtggcacggccgttgtttttataaatatgttaaccgttataaaataacgtatcaaaagtcaagtgatcacatttcaaatatcaatttgatagtattggcatggtgattatttatgggtagcaataaaaggacagtatttatcatccatagggatagtctctgtacttttattcccattatgctaatgccttactgaattatgaagcatttcttaagcatccaactttagctagattaatggtttattattttctacatcttcaatatataaaagcgtattatcaatggcgtagtaactgcgtttgttatgattaacatcagtaacccaccggaaaacgcccgcgcctgccagtgttgaacagtattcccgaaatgtagattttccgcaaatatgaagcaatgcggcctcttttattttagcagggttcttggtcgtactaacttttaacaggttcctggttcctcttaataacaaaaccgtatcatcgtgagtaataattctgatgttatccgtagccagataataaatgtaatgtgcaatacggtgatgttttaattctgaataaaaccaggagaagttttgctcttttctcacttgctcaaacatcttttgaaaaacaacgacctgatccatcaggataataacctcttgttagttgtgagactgcgtagtgtgcacgatcggttttaccacttcaatctggtctgtcctttggctgtgatatgtacagagtgtgatagagggaatatctgaattctcccggtgagcattttgcaacggaccagctccggtacaaacgctgttgtgggttcagattataacattctgtctaaggggcgggataaaggtgaaattagggggcatgaaagatgactttataaccttgctcaccccagtgttgtaaaagttcgttttgccttctcgttggtgccatgcctgtccagacaatcaatgtttgcgtcgggaacagttccgggcgcggcgattcaatgggatcagcaagaacagaaatgtgccatcctgacaatgataaacgccatgcttccagccacaatcgtgctctctcttcaacattccacgccatcagaatggcttctttaccgggcttacggcgcatttcgaaaagcgaggttgctgcgtattcaattaatgcgccgtcaaacatactgctcataatgcgggaggtgttgtgatcaagcacgagacgctggcgaacaggaaggtaaacatgattaatcaattgatctactgggtactctcgacccagtgaaataattctcgcgcgtagtttggcaggattagccatgcgaagaattgacatcatctcttcttgcaggcggctccagtcatcttccgtatcctggctggtggtttccagtaatgctttaactttgcctacagggacgccattacttatccaacgcttgatctcttcgatgcgttgtatgtcttcttcatcaaagagtcggtgtccgccttcactgcgctgtggttttaacaaaccgtagcggcgttgccaggcccggagagtgacaggattaatcccgcaacgttcagcaacatcaccaatgctgtaataagccacaattcctccttgcggtcacaaatctccgtcgcctgtacacgacccaataatactttgtacaatatacgctaaaattgtacaaagtataaataagatttcagctaaattggatgaaacattatttttaatgtggattaaatttaaacgtaacgtattcattttcacgatgatttactgaaatcatgtgaaagaatgtgctgaaaattattttttctctggccacgctatggaagggataccattcaatttagctttagcaaacagatctccctgaaacatctcaattcctgcggattcaagccacatccactcttctggtgttgccacgcccatagcactgacttgaatttcaagtgatgtacagcattttatgatcgcctgaataattgcctgccgtggcccacttttatgaacattggtaatcaattcctgactgattttaattctgtcaggctggaagcgtgacaggagtaacaaaccagcaaaacctgcgccaaaatgatcaattgctacactgataccagcagcctttagcgatttaatcgcttcggcaaactcatcaaaccgagatatgacttcactttcagtaaattcaacgatgatttgttcaggcaccagagcattggcctttatttcattaagtaaaaaagagactgcgtcaggttcgttaaccagggtcataggtaatagattgattgaaatcattttatcaccgagctcaagtgcgtgtgccatcgtgaatgcaagcgccttacttttgagatccgctgtgtagatttccccgtctttacgctgcccaaccgctatggctgatgggctatcttcatttttttgcacaatggcttcaaaagcgattatccgccgcgataagggatcgacaataggatgaaaggcaaagtggtcgtttatagttggtgaaagggcacaggaatcaagttctttatcagatccgtcagcgataaaaagccaggagtcttcggcagggatctcgaaataggttgattgttcggttgcaaggacaaaagtacgaaaaaattgtagcgctctgtcatcataagttagctgaaattttgatgtgcctttgtcgaatacggcctgtaaaacgtcatctcgctcgtgcaggcgcaaatcaaataattccattcccgctttgccaaaacggcgagcaggcgcgtaatcgcacagcagctcaacaatattatagtgccgtggatcctggcatatagcccgatatatcattttaacctgttcttccggaccttccagaagctggaaaaaatgagaaccattaaacagtaagatccctgttacgtcagactgcatgttcctgcgatttgctatcgaaaccatttcttcgatttttttgacaggttcgtcgtcacgtatatggctacgataaataagggtggtaagcattaacaatccagggtaatgggtgaggcgagagtaagacggtaacagacatatcttcttgtgtctttcttttaataccaaaacataaccgtttctttacattgataaaaaatggaaaaagttgaacactagttggcgaaaaatcttgtatagattgtcagttaaatgatgcaatatgttttatcataacacattgttttatatgcattagcactaattgcaaaaaattaatttatcattctgtacacatatttcgtacaagtttgctattgttacttcacttaacattgattaacatttttaacagaggcgtagcatgcatcaaaattcagtgactttagattctgcgggagcaatcactcgttactttgcaaaagctaacttgcatactcagcaggaaactctcggggaaattgtgactgagattttgaaagatggacgtaatctgagtcgaaagtcgctttgtgccaaacttctttgccgactggaacacgcgactggggaagaggaacagaaacattataatgcactaattgggttgctttttgaataatgcaacagcctgattatttaacaggttagctatgaagtcgttatgaagacatctgataatgaacgtataaaatatgaaattactggccaggcggtgctccagatactgcgcatgaagataaatttttcattgcagactcttattaagcaattactcgtaatgaaatcggctgaggaagatgctttccgacgcgatttaattgacagcataattcgtgattttagcaatagtgattcaggagggccaaaccgaagaacagcgacagctgacaataaaagtatgttcaatggtaagaaaataaacagaatacattaaaatttcataagtaagatgagaggttaccatgcttgaagatactacaattcataatgcaataactgataaagcgttagcaagttactttcgcagttcgggtaatttgttagaagaagaatcagcagtgttagggcaggctgtcaccaatttaatgctttcaggcgataatgttaataataaaaatattatcttaagtctgatacactccttggaaacaacaagtgatattctcaaagctgatgtgattagaaaaacactggaaatcgtgttgcgatacacagctgatgatatgtaacttctaattattaagtataagtttatagaaaactcattcatcttatttttgtctgtcgctttagactatacacagcataattttattgggttaatatttctacgaggctgacatgaataattcaatcccagagagatttatttttcaatgtgctttgtttaaaaatctcgagagggaggtgttcatgacgcatgggtatgttgatagtcatattattgatcaggctttacgcttgcgtttaaaagatgaaaccagtgtgattctttctgatctctatctgcaaatattgcagtacattgaaatgcataagactacactaacggatatcattattaatgacagggaatccgtgctctcttagaacttgagtaaggttttagaataaacatcagctgtatcaccatgctgatgcaaagtgagcatttcaggcgttatgctttcttattatgtccgcaatatcaggtgtcaagaatggagagttctcgctctccattcttgacgcctgatatcccgcctaacttattttgtactgcctacattatgctcaataattaatgggttagatcaagatggagaaaattttatcttcggcgtggatatttcttatgctctctaccatgctctctgtagatgccagcgcgagcgaatgaatggcattttcatgtattaaaccctttggccgggacaagcaaatgcgcaatacactcatacccatcctcgttgcgatatgcttgtttattaccggtgtcgctattttgaacatccagctctggtattccgcaaaagcagagtacctggcgggagcgagatatgccgccaacaatatcaatcatatacttgaagaagcgtcacaagcgactcaaacagcggttaacattgccgggaaggaatgcaacctcgaggagcaatatcagcttggcactgaagcagctctgaaacctcacctgcgcacaatcatcattctcaaacagggaatagtctggtgtacatccctgcctgggaatcgggtcctgttgtctcgtattcctgttttcccggacagtaatttactgttggctccagcaatcgacaccgttaatagattacctatcctgctctatcagaaccaatttgcagatacgcgcattttggttacgataagcgatcagcatattcgtggggcacttaatgtacccttgaaaggggtaaggtatgtattacgcgtggcggatgacattattggaccaacgggtgatgtgatgacgcttaatggacattatccctataccgagaaggttcactccacaaaatatcatttcactattatctttaacccgccgccactctttagcttctacagacttatcgataaaggctttgggattttaatatttattctgttaatcgcctgcgccgctgccttcctgcttgatagatatttcaataaaagcgcaacgcctgaagagatcctgcgacgggcaataaataatggggagatcgtccctttttaccaacctgtggtaaatggtcgggaagggacattgcggggagttgaggtgttagcccgctggaaacaacctcacggtggatatatatcacccgcgcatttattccacttgctgaaaaatccggattaatcgttccgcttacgcaaagcctgatgaatcaggttgccagacagatgaacgctatcgcgagtaaattgccggaaggttttcatattggaattaattttagcgcttcgcatattatttcgccgacgtttgtcgacgagtgtttaaatttccgtgacagttttacccgccgcgatttaaaccttgttctggaagtcaccgagcgtgagccattgaatgttgatgaaagtctggttcagcggttgaacatactgcatgaaaatggttttgtcatcgcactggatgatttcggtactggctactcagggctttcttatcttcatgacctgcatattgattatatcaaaattgatcacagtttcgttggccgcgtaaacgcagacccagaatcaacccgaattctggattgtgtattggatctggcgcgtaaactttcgatcagtatcgtcgctgaaggtgtcgaaacgaaagaacaacttgactatctgaaccaaaataatatcacatttcagcagggttattatttctataaacctgttacatacatcgacctggtcaaaattatcctttctaaaccgaaggtgaaggttgtggttgagtgaaaattgatcagtaaggccatagtgcggtgtaattatagacagctaattagctcgttgcctcttgttactattgttcattattttgtttgctataattgtttgaaagttttgacaggattgccattagtagcatgaacaatagtaataatctggattatttcactctctatatcatattttccattgcatttatgctgatcaccctcctggtcatccttattgcaaaacccagtaccgggctgggagaagtgcttgtgacgataaatttgcttaatgcccttgtttggctggcgatcaatctggttaatcgattaagagaaagactcgtcaaccacagggatcagcaataatctttcagtttctcactgtcagtatgcggctgaatgggttgctggcagtgaacgcctggatcattgaaggaaaggcattattgcgcaaatagttgtcaaccctggtgttatcacggttgtttttatatatcaccgaaataatcctcatcgcaactattaacaattttgatgtcgaagagttatttgttaaacaaaatcgtcacctcaaagtgatcaatgtcatgaaaataaggtgaaaaatgataatgccgacttatttatcatttatatattgtcgctgtttatctatttaaattttttgtgcttttgtttttgtctttaccctccgttttggtaatctgagctcataggttatttgaccaggaatgtttgttaatccaatgaatggatggttaatctatgaaactgaaaaaactccccgggtttagtttgggacttattgctctggcggtgggtaatgcatatgcaacacaattgttggatgattatagtataatttcctatatgactgatgaagaatcgccgattgaaatcaaagataataatccgataagtaatggagagtatctaaccactgaagacgaaagccatgctgtgaaagtggatgacggtgtaactggatatataaataatgccagtgtgatgactagtggtgatggatcttatggtatttctgttgatagtcaaaacaaagtattatatataagcgatagcgatattaagacctctggaagcgtatctgacaaagaaaatggagggataacagccagcgcagtagttagtgaatttggtggcaccatctttatgaatggtgataattcagtcgagtcgggtggggcatattcagcgggacttttaagctaggttaatgattctgaaaagatggtaaataacacccgtcttgaaaccacagataaaacgaacattgttacctctggggaaaatgcagtaggtgttcttgcatgttcaagtcctggagagtctcgaacatgtgtcgatgctgtagatgatgaagttagtgattctaacagttacgaagttattagccgtgctgatttaaaaatgaatggtggttccataacaactaatggcattaatagctatggtgcttatgctaatgggaaaaaagcatatattaatttagattatgtggcacttgaaactgtggctgatggaagttatgcagttgctattcgacaaggtaacattgatataaaaaatagttctattacaacaacaggcactaaagcccccattgcaaaaatatacaatggtggagagttatttttttccaatgtcaccgcggtatcaaaacaagataaaggaatatcaattgatgcatcaaatatcgattctcaagccaaaatagcactattaagtgttgaactttcaagtgctttggatagtattgatgttaacaaaactacaacggatgtaagtatccttaatcgaagtattattacacctggtaataatgttctggttaataatactggaggtgacttaaacataatttcgtccgactctattctaaatggagcgactaaactcgtcagcggcacaaccacgctgaagctttcagaaaatacaatctggaatatgaaagatgactccgttgttacccatctgactaattcagacagtattatcaatctttcgtatgatgatggtcaaacatttacccaaggaaaaacattaaccgtaaaaggtaattatgtcggtaataatggtcagcttaatatccgcaccgtattaggtgatgataaatcggctacggacagacttattgttgagggtaatacttcgggttcaactaccgtctatgtgaaaaatgctggaggaagcggcgcggccacgctaaacgggatcgaactcataactgtgaatggcgatgaatctccagcagatgccttcagataaggtgatgcaaggattgcagctggagctttcgaatatcaactaaaacaacaaggcaaaaactggtatttgacaagttatcagtcagtgaatgaggaggataacagctcagagggaaattcagaatcaacagaaacgcctacccccgtcctgcgccccgaagctggaagttacgtcgctaacctggcagctgctaacactctttttgttatgcgtctgaacgaccgtgcgggtgaaacgcgctacatcgatcctgtaactgaacaggagcgttcaagccgactttggctacgtcaaattggcgggcataatgcctggcgtgacagcaacggacagttgagaacgacctcgcatcgctacgtctcgcagttagggggcgatctgttaaccggtggttttaccgatagtgacagttggcgtttgggagtgatggctggttatgcccgcgactacaacttaactcattccagcgtgtcggattatcgttcgaaagggagtgtcagaggctatagcgcagggctgtatgccacctggtttgccgatgacatcagtaaaaaaggcgcatacattgactcctgggcgcaatatagctggtttaaaaactcggtgaaaggggatgaattagcctatgaatcctatagcgcgaaaggtgcaaccgtctcgctggaagcgggttacggttttgccctgaataaatcctttggtctggaagcggcgaaatatacgtggatcttccagccacaggcacaggctatctggatgggcgtcgatcataatgcgcacacggaagccaatggctcacgtattgagaatgacgcaaataacaacatccagacccgactcggcttccgcacctttattcgtactcaggagaaaaacagcggtccgcacggtgacgactttgaaccttttgttgaaatgaactggatccataacagtaaagattttgctgtctcaatgaacggtgtgaaagtcgaacaagatggggcgagtaatttgggggaaattaaacttggcgtaaatggcaacctgaatccagcggccagcgtctggggaatgtgggcgtgcagctgggtgataatggctacaatgacaccgcagtgatggtgggcctgaaatataagttctgatcccgccgttagctaaaaaaccgcgtcgtattcatcgacgcggtacatatgaaaaattattttttgccgatagcacgcatggtgtcatcaattgccgtgatcaacagcatttgcgggtctttagcgcaaacctgattcagtttttctaccactttggcgctcagttccggagattgctcaatttttaaatcacggctggcaacgctggcattacccattaccgcaacaatttctgcaacctgtgcgctgtcagtttttgccatttcgttggcttctgcgcaagtaatataggtttctgacggcaaaccgtttttaatattgtagtcctgcgcccaggtcattggtgcgaaaacaaacaggcccgccagtaaagcaaattttttcatcatcattccttatttcattttacccagaattgcaccacccgtaccgccaatcacggcacctttaatcgccccttcgaggccattgccggtcagaacgccagtgacagcaccaacggcggcacccacttttgcacctttacgcgcatttttaccgtcgcggcctttttctgttactgcaccaacaccagcgccaacagctgcacctttcagtacgccattaacaccattgccagtaagtaaaccaacgcctgcgcctagcaatgcacctttcgtggtgcggttcatatccgccatcgctggcgtggagcagaacaatgctgagataagcccgaaggcaagtatttttttcttcaacttagatgtccggtattaagtaagttgcacacacaataatttcgtcttcaattaagatctgcttaactaaagaacgctcgctattattcagataattcaaaatgagcgtggctgtgatgataggaattatgttttttacgtgaatgagaataatcttaaatgaggaataactcattgattgacaatatttttattcaagaagtgtcattgactgttaacgcaatgttgtaaaggtaagataatctgatttatcaatattattgtgtgatttttatgtgagcagaagatattcatcagcaacgattacattagtcattttattttgccgacggcctcattgtcgaaagataagcgtacgacagtattatcagaaaagagtgattttttatccaactacacttcagcgcactgcgtgtaaaaaatgcctctttcttatgcgggatatcatcatttcatcatgatgtctttggtgagcggtgaacacaatacacctgcgctgtctcttcaggatgaatcccctggtctggtgcctgcgggctgatgttgcagcagagcttaggtcacttagacgctactatcatttatccaatggcatggaatcgaaatcagtcgatacccgcagtatatatcgtgaactgggtgcaacgctgagttacaacatgcgcctggggaacggtatggaaatgaaccctggctgaaggcggctgtgcgcaaagaatttgtcgatgataaccgggtgaaggtgaataatgacggtaatttcgtcaatgatttgtcgggcagacgtggaatataccaggcagctattaaagcctcattcagcagtacgtttagcggacatctcggggtggggtatagccatggtgccggtgtggaatccccgtggaacgcggtggctggtgtgaactggtcgttctgaccatcaacgattaaactgcgcttcggcgcagttttcgtttacaggatgttgaaagggaaaattctggggcaaaaaaagcccgccagttacggcgggaaacctcatcctatgggagaacaatgaataatgaaattgcggggttatcatctcccagtatatccatactaacaataaggttatttactcaaccaggcataaacattttgttttgtgcgtgggaacagccttaaggtgtaaagggggaggtggaaatagcaatgaggagtatcagcaagaatactcgccgctttaccacaacgtggatgagagggatgaaaaactcaaggcagagataactctgccttgaagataaatgcgcttttacagcgggcttatttcagctcttctgcttccggtaaggtcacgttcagctcaagaatagaaatatcgccatctttttgctcaagctgtacggttaccatctcaggatcaatttgtacgtatttacaaatgacctcaagaatatctttacgcaactgcggcagataatgcggttctgcatcgctgcgacggcgttcagcaacaataatctgcagccgttcttttgcaatgttggctgtgtttttcttccgcgagagaaagaaatcgagtaatgccataacttatcctccgaacaagcgtttgaggaagcctttcttctcttcttcaatgaagcggaaaggacgttcttctcccaacagacgttctacggtatctgcgtaggctttacccgcatcggcgttaatgtcgagaatgaccggttcaccctggttagaggcgcgcaatactgattgatcctctgggatcacgccgacgagtttgatgcgcaggatctccagcacatcttccatgctcagcatgtcacctctgcttacgcggcctgggttatagcgcgttaacagcaggtgctctttaataggctcttcgccattttctgcgcggcgtgatttcgacgccagaatgcctaaaatacggtcagagtcgcgtactgaggagacttccgggttggtggtaataatggcttcgtctgcaaaatagagtgccattaacgcaccggtttcaatccctgccggggagtcacaaacgataaattcaaaatccatcgctttcagatcatcaagaactttggcgaccccttcacgggtgagggcatctttatcgcgtgtttgcgatgccggcagaatatagagattttcagtacgcttatctttaattaacgcctgatttagcgttgcatcgccctgaatgacgttgacgaaatcgtaaacgacccggcgttcacaacccataatcaggtcgagattacgcaggccgatatcaaaatctatcacgacagttttctttcccttctgggccaaaccagtggcgatggccgcgctggaggttgtcttaccaacaccccctttgcccgaagtaacaacaataatgcgtgccatagaaattccttgttaaaaagggatcaatttaacggttgaacggtcaaagcgttttcgactaactgcagtcgcgccgctttgccataaaattctgctgggatttgatcactcagccagtattcacctgcgatggacaccagttccgccatcaggttcgtacaaaatatttgcgtttcccggtcaccacttgcccctgccagcgcacgaccgcgcatcatgccatagacatgaatgttcccatcggcaatcaattcggccccagcgctaacgtggcttgtaacaatcagatcacattgtggagcataaatacgctgaccggaacgcaccggggtatctattaaacgcgtttttgtgaccggcgttgtattttgcgctggagcctgcggtgtgggagctggacgtggcgctttttcctttccttccgtcaggataggcagccccatcttttcaatttcggctttaagttgcgcatctttgcagccacttacgccaataacccgcaaaccggttgccgaaaccgccttatgcatcgctgaccagtttaccgggtcttccagtgcactgacgttgagtacaacgggggcatgttttaaaaatgcgggggcctgagcgattttgtcttccagcgcctgatggataaccttaggttctgcctcatgcagatgaaccacagataaagtgaagctactgcctttaagctcgattggcgtgtttgacatcctggccttactcaattagctattaatcatcgccagcgcgcgatgatgttccgaagactataaggcatgttatagtctggattatattgaggcaagtcaccctcccatttattcagagtaaaagtctattctgtgataaatggcgctgattcatagcttaaaaaatacccttgtcaatcaacccattgccgtcgtacttttgattgttcttatttacgcttcctttttccgcaccctaatcgtgacagcatctccagacctgtttaaatatccagtattgaggcaagtgtattttttcaccacgccaggctttcttaactttccattttttgcggcatcattaaagaacagatacccgttatcttaatatccgccacagaattgctctatcatagaaaccgcagaagacgtctgatacttctgtcaggtcatcgtaactcgtccaggtcagcggttttgattacggattgatgatgaaatgagcataagtgttgtacggttggattatcaggatgtgctatgaatatgatgcgtattttttatatcggattgtcaggtgtggggatgatgttctcatcaatggcgtctggaaatgacgctggcggacttcaatctccggcgtgcggcgttgtttgcgacccgtatatttgtgtgaactcagatggcatttccccagagttaacaaggaaatatctcggcgaaaaagccgctgaaaacttacaatcattacaaggctacgatcccagcgaatttacattcgctaacggtgtattttgcgatgttaaagaaaaattatgtcgtgatgatcgttattttggtgtggatggtaagcggagtggaaaaatcaatcaaaccaccacaaagatgttatttatgtgtcgtgagtgatgtcttgtttacattatgttctattcgtcattaacctcttgagcgacagagaggagtggggcattaacgtttatgacggggagagtccccgtcggttgacatttacttaatttgaatatcgacgttatattttttagttttgtttttacgggcgtcgtttcgggtttgcaacactcgcagctcatatttgccagaagcagggagtgagtattgtccgtgactatcgagttctggggaatatctggataaatcaactgaatcatcgattcctggcccgaagaggtaagtatcagcgccttcattagagatactcacatgcactttctgaccttttttggcatagaaggtatatgtatcgtaatcgtatccctttatttcgccggagtactgagcgctgctatggccttttctgaactcaacattgacattcttacccgcagcaaagctcgtggaggttagcagtgcaagcagcaatacagccttcctgatgctcttgattttcattggtagtctcctgttcagaatgagtacgatgaactgttataatataacaatccctaacgggagaattccagtggctttcctacgttcggtaaaatcacgttgcggcatttttgccggggggattacttataaagggggcatggactcaacaaaccgtagaaatctacagctggctggcttgtggcgcgggtttcattgatgttagcttatgccaaaacctggcatcttaaagagtaaaagtatgttttgtgtgatttatcgaagcagcaagcgtgaccagacctatttatatgtcgaaaaaaaagacgatttttcgcgtgttcctgaggaactgatgaaaggttttggtcagcctcagttagcgatgattctgccgctggatgggcggaagaaactggtcaatgccgatattgaaaaggttaaacaggcattaaccgagcaaggttactatttgcagttaccgccaccacccgaagatttgctgaagcaacatctttccgtcatggggcagaaaacagacgacactaacaaataaccgatatccggcggtggcattatctttgtcggcgcgggttttcatatccacgataaggtgaggggaacgttatgtatcaacatcacaactggcaaggtgcgctgctggattatccggtgagtaaagtagtctgtgttggcagtaactatgccaaacatattaaagagatgggcagcgcagtgcccgaagagccagtgctgtttattaaaccagaaacggcactgtgcgatctgcggcagccattggcgatcccatccgatttcggttcagttcatcatgaagtcgaactggcggtgttgattggcgcgacgctgcgtcaggctacggaagagcatgtccgcaaagccattgccggttatggcgtggcgctcgatctgacgttgcgtgatgttcagggaaaaatgaagaaagccgggcagccgtgggaaaaggctaaagcgtttgataactcttgtccgctttccgggtttattcccgcggcggaatttaccggcgacccgcaaaatacaacgctgggcctgagcgtaaacggcgagcaacgccagcaaggtacgactgcggacatgatccataaaatcgttccgctgatcgcttatatgagcaagttttttaccctcaaggccggtgacgttgtgttgacaggcacgcctgatggcgtcggcccgttgcaaagcggtgatgagctgacagtcactttcgatgggcattctttgacaactcgcgttttgtaatactttttgccgcctgaaagcggcggcaaaacttgcatcgctgtgccagactggttataaggtgcgttttaacgtaatggcggaacacctgatgagcgatgtacctttctggcaaagtaaaaccctggacgaaatgagcgatgcggaatgggagtcgttgtgtgatggttgcggtcagtgttgcctgcataaactgatggatgaagacaccgacgaaatctacttcactaacgtcgcctgtcgccagctcaatattaaaacctgtcaatgtcggaactacgaacgtcgtttcgagtttgaacccgactgcattaaattaacccgtgaaaatctgccaacattcgaatggctgccaatgacctgcgcttatcggttgctggcggaaggtaaagatttacctgcgtggcatccgctacttacgggttcgaaagcggcaatgcatggtgaacgtatctctgtgcgtcatatcgcagtgaaagaatcagaagtgattgactggcaggatcatatcttaaataaacctgactgggcgcagtgataaatttaatagatgttgatgggggctttcttaatatacgtctggatgctcgccatttcgtagccctgtttttgaaagcgctctgtcataatgagagttacccgataccttattatcaacaggtaactctcaatctttaaaaaacgtctgtgtttttaaatgtgataaaccttataccttgagtacatggagagaataatagcttatcagacttcaggtacctcaaagagtgtctttttaccgtgtcttttctgatactcattacaggtgttaatcatttttttggccgcttcttttagcaaagaaagcattaaatcatcataatcaacatagaatctggttgtttcagtttccgtttttatctccccgatggcgactatttcggtggttaatttcaatttggcggcatcgatatctttattcgcttgtttaaccgtgtttgacagggtggtaaagaaattctgcacagattttaacttgttcttcaattctggaatcagtttcccttcaactacgcccgcagcaatagaataggaaatgattaatccaaatggaccggcgacgacaccggcatacgcttccttcctgattttatctacctgtgactggaaatagctgttttttttctgaaaaatcattggttaactggctatctaacgccagcagtttcccggaagcgttgttgaaactttgtgagcttaccagcagggatttttgcgcttcattcagcttcgtgatgccgtcatccagtaccttaatgagaatgtctttctgggcggatgctttcttctcattgtactcatcaaatagcaaaatatacgctgcgagcaattgcgtcgcaacaccaaaccattcatacactgtttgggttgcttcaaaatacttatcctggctatccataagtaaggttttaatatcgccgactaaaacggaggctgcctgtgaatactcctgtttaaagcgacttaactcttttatggtttcatcaaaggtctgccaggggatgacctgatcgagatatttattataaagatctaatgctccatctgcggtttcgattgcgtttttaactacttctaccgttttatctgcaacgatttcagtcataatcattcgcctctttaaatatataaattgtaatgaaactcctgttttacaactattaataaattttacttcatctaattcatagttagccgggcgggatgcgtcaatgtctttatttctattaatatgataaatatcaaacaatgtttaatgtcattatggcgaatgcttctattctatttttttgccgggtgatatttttcatttctgctggatgagcgtcgtcgccagaaggccacgtgagcacaggataagagaacgaaaaatcagcagtctatgcagcgacaaatattgatagcctgaatcagtattgatctgctggcaagaacaggctactgtatataaaaacagtataacttcaggcagattattatgttgtttatcaagcctgcggatctccgcgaaattgtgacttttccgctatttagcgatcttgttcagtgtggctttccttcaccggcagcagattacgttgaacagcgcatcgatctgaatcaactgttgatccagcatcccagcgcgacttacttcgtcaaagcaagtggtgattctatgattgatggtggaattagtgacggtgatttactgattgtcgatagcgctattaccgccagccatggtgatattgtcatcgctgctgttgacggcgagtttacggtgaaaaaattgcaactacgcccgacggtacagcttattcccatgaacagtgcgtactcgcccattaccatcagtagcgaagatacgctggatgtctttggtgtggtgatccacgtcgttaaggcgatgcgctgatgtttgctctctgtgatgtaaacgcgttttatgccagctgtgagacggtgtttcgccctgatttatggggtaaaccggtggttgtgctatcgaataatgacggttgcgttatcgcccgaaacgctgaggcaaaggcgctgggtgttaaaatgggcgatccctggttcaaacaaaaagatctgtttcgtcgctgtggtgtggtttgctttagcagcaattatgagctttacgcagacatgagcaatcgggtgatgtcgacgctggaagagctatcgccccgcgtcgagatttacagtattgatgaggcattctgcgatctgacaggtgtgcgtaattgtcgcgatctgactgattttggcagagaaattcgcgcaacggtgctacaacgtacccatcttactgttggcgtggggatcgcccagaccaaaacgctggctaagcttgccaatcatgcggcaaaaaaatggcagcggcagacgggtggggtggtggatttatcaaatctggaacgccagcgtaaattaatgtctgctctccccgtggatgacgtctgggggattggacggcggatcagcaaaaaactggacgcgatggggatcaaaaccgttctcgatttggcggatacagatatccggtttatccgtaaacattttaatgtcgtgctcgaaagaacggtgcgtgaactgcgcggcgaaccctgtttgcaactggaagagtttgcaccgacgaagcaggaaattatctgttcccgctcgtttggtgaacgcatcacggattatccgtcgatgcggcaggccatttgtagttacgctgcccgggcggcggaaaaacttcgcagcgagcatcaatattgtcggtttatctccacgtttattaagacgtcaccatttgcgctcaatgaaccttattacggcaatagcgcgtcggtaaaactgctgacgcccactcaggacagcagggatatcattaacgctgctacgcgatctctggatgccatctggcaagcgggccatcgttaccaaaaagcgggcgtgatgctgggggatttcttcagtcagggagtcgcgcagctcaatttattcgatgacaacgcaccgcgccccgggagtgagcaattgatgacggtaatggatacactgaatgctaaagagggcagaggaacactctattttgccgggcaggggatccagcaacaatggcagatgaagcgagccatgctttcaccacgttatacaacgcgaagttctgatttactgcgggtcaaataaatatagcggcaggaaaaaagcgctcccgcaggagcgccgaatggattagcgaccgaacagatcacgtttttttcgctttaaacggctgggaaatcaccaccagcactgcgacaatcaggtaagcgataaaaataccgagcagccactgcggcatttccagacctaaaaaatcccactgacgctcggcgcaatcgccagaggcgacaaacacttgcggcacccacttatccagcggcagccattccgggaaacgaaccataaaatcacaggtggcaaacggcgaaggatagagctgaagcatggtgtgctcgtaagttaactgcacaccgcggaacgcactatacaaccagataaccatcgctacataacgcagcggagttttcggggcgatcgcgccaatcagcgccgcacccagaacgccgaataacgcgcagcgttcataaatacagagcacgcaaggtttcagtaacatcacatgctggaaccacagcgccgtcagttccagtgccagagcagtaaacgccatcaacagccacgcgccccggccttgtgaacattggttcaaaaatcgcaacataatcatttccctgcaatatgcatagagtgcgcagtttaaaccaattcattcgctgcgccaccaggaggcagcaaaaataggacgcaattggacaattatcgggcgaaaaggcaaaccgggcatttatatgcccggtaagttgttatcaaagcgttgctatccagcccatttgcataaaccattcggttacaggggcaagcgtaaactcgacgcagagcaagccgacgagtgtcaggacgagggtgtaaggcagggccatccacaccatgcggccataagagaggcgaatcaatggcgcgagtgcagaggtcagcaggaacaggaacgcagcctgaccgttcggcgtagcgacggagggcagattggtaccggtattaatggcgaccgccagcagctcgtattgcttcaacgtgatagcgccactttccattgccgctttcgcttcgttgatataaatcgtccccacgaagacgttatccgaaatggatgacagcagaccgttgaaaatatagaacagcgacagctgagcatgttccgatgcctgcaacacaaactgaataattggcgaaaacagttgttggtcgataatcaccgcgactaccgagaaaaacaccgtcaacagtgcggtgaatggcagagattcggtgaaggctttaccgatagcatgctcatcggtgacaccggtcaatgatgttgccagaataatgactgacaaaccaatcaagccaacttccgccagatgcaacgccagcgcagtcaccagccagacgccaataatcgcctggacaatcagacggattttatcctgacgggtacgctggtggcggctttgatcgtcaaactgttgcaacacttcgcggactttctccggcagcgtttcaccgtagccaaaccaacgcagcttctctaccagcaggcaggttaacaggccacaaatcagaaccggaacggtcaccggcgacatgcgcaggaagaaatcgccaaaatgccagccagccgctttagcgatgatcaggttctgtggttcgcccaccatggtcattacgccgcctaatgcggtgccgacaccggcatgcatcatcaggctacgcagaaagccacggaactgttccagaaccactttgtaatgcttgtcgatatgactatcgtcttgcaggtcggtgtcttcggtacgggaagaggctacgcggtgataaataccataaaaaccgactgcaacgctgatcaccaccgccacgacggttaaggcatcgaggaacgcggagaggaacgcagccgccacgcaaaaagagagcgacagcagcattttggagcgaatgcttaacagcaaacgggtaaatatgaacagcaacagctgtttcataaaatagatacccgccaccataaacatcagtaacagcaagacttcaagatttgccgccacctcttcacggacgtgttccgcgctggtcatgccgatgaataccgcttcgatagccaacagaccaccggggagcagcgggtagcatttcagggccatcgccagagtgaaaataaattccgctaccagcaaccagcccgcgacgaaagggctgatgaggaaaattaacgggtttacgattaagaaaatgatgagggcgagtttgtaccagtcgggggactggcccaaaaaattgcgccatagcgcgcggccccaggagatctccatgatggtttcccttaccttacaaataatcaatgatgtttttatgtttaaacgcaaagcttaacggtcaggcaggagtgaggcaagtcttgatagtcaaggggaaagagatgcggaaaatgaagccttgatccctttttcttctttttgtctgctatcagcgtagttagccctctggtatgatgagtccaactttgttttgctgtgttatggaaatctcactatggtcattaaggcgcaaagcccggcgggtttcgcggaagagtacattattgaaagtatctggaataaccgcttccctcccgggactattttgcccgcagaacgtgaactttcagaattaattggcgtaacgcgtactacgttacgtgaagtgttacagcgtctggcacgagatggctggttgaccattcaacatggcaagccgacgaaggtgaataatttctgggaaacttccggtttaaatatccttgaaacactggcgcgactggatcacgaaagtgtgccgcagcttattgataatttgctgtcggtgcgtaccaatatttccactatttttattcgcaccgcgtttcgtcagcatcccgataaagcgcaggaagtgctggctaccgctaatgaagtggccgatcacgccgatgcctttgccgagctggattacaacatattccgcggcctggcgtttgcttccggcaacccgatttacggtctgattcttaacgggatgaaagggctgtatacgcgtattggtcgtcactatttcgccaatccggaagcgcgcagtctggcgctgggcttctaccacaaactgtcggcgttgtgcagtgaaggcgcgcacgatcaggtgtacgaaacagtgcgtcgctatgggcatgagagtggcgagatttggcaccggatgcagaaaaatctgccgggtgatttagccattcaggggcgataatcccttccgtttaaagagcaaacccctcaaacgaggggttttttgttgtttttacagatttcccattcttggcgggcaacgttccagcaactcgatgctgccgtcttcgttttgctgttcgagcatcacatcaaatccccacaggcgatgcacatgcttcaggacttctttgcgcccccgatccagcggtgcgcgattatgtggaatataacgcagcgtcagcgaacggtcgccgcgcaaatccacgttccagatctgaatattcggctccagattacttaagttatattgcgacgataaccggttacggatctcccgataaccttcttcattatgaatagcggaaatctccagataattatgccgatcgtcatccagcacggtgaagaagcggaaatcacgcatcactttcggtgacaggaactggctgataaaactctcatctttgaaatcacgcatcgcgaaatgcagcgtttccagccagtcggaaccggcgatatccgggaaccagtatttgtcttcttccgttggcgactgacaaatccgtttaatatcctggaacatggcgaacccgagggcatacgggttgatgccgctgtaccacgggctgttataggggggctggaagaccacattggtgtggctgtgcaaaaactccagcataaaacgttccgttactttcccttcatcatacagatggttaaggatggtgtagtgccagaaggtcgcccagccttcgttcatcacctgagtctgtttttgcggataaaaatactggctcaccttacgcacaatacgcaggatttcacgctgccatgattccagcagtggcgcatttttctccataaaatagagcaggttttcttgtggttcggacggatagcggcgcgcttcagcaaccgttttctcttcctcgcgcttcggcagggtacgccagagcatattgacctgactttgcagatactcttcgcgacttttctgccgggctttctcttcttgcagcgagattttttgcgggcgtttgtaccggtccacgccgtagttcatcagcgcgtggcacgagtccagaagccgttctacttcatcaacgccataacgctcttcgcactcggtaatatatttacgggcaaaaatcagataatcgacaatcgaactggcgtcggtccagctacggaataagtaattgtttttgaagaaagagttatgcccatagcaggcatgagccatcaccagcgcttgcatggtaatggtgttctcttccatcaggtaagcgatacacgggttagagttaatgacgatttcataggccagtccttgctgaccgtgcttatacagccgttcagtctcgataaactttttaccgaatgaccagtgcggatagttaattggcatgccgacgctggagtaggcatccatcatctgttctgaggttatcacttcaatctggtgcgggtaggtatccagccggtagagtttcgccacccggtctatctctgccagataaacatccagcaggtcgaacgtccagtcgggtccatcgctcaaacgtgtggtgtccttattcatagaatcgatcgtcgccatacgcgcacctcattgttgtcggcgctctctgtgtggagcacctcatttcaagcatagaacacctgttaaaaaccgcgtcgccggagaatttttttctttgcgatttcttattatcagagtgccactaatccgcttctgaacggaattttatgctggataaaaagggcgttcagcaggagatactaaagacgccatattgccgcagagtcagggagatgtgagccagctcaccataaaaaagccgtatgttgaataatattttcaactgagttatcaagatgtgattagattattattcttttactgtatctaccgttatcggagtggctatgcgagttgtcatactgggaagtggtgtggtaggcgttgccagcgcctggtacttaaatcaggcaggacatgaggtcaccgtcattgatcgggagccgggggccgccctggaaaccagtgccgcgaatgccgggcaaatctcccccggatatgctgcaccgtgggcggcaccaggtgtgcctttaaaagcgattaaatggatgttccagcgccatgcgccgctggcggttcgtctcgacggtacgcagttccagttgaaatggatgtggcaaatgttacgtaactgcgacaccagccactacatggaaaacaaagggcggatggtgcgtctggcggaatacagccgtgattgcctgaaagcattgcgcgccgaaaccaatattcagtatgaagggcgtcagggtgggacgctgcaactgttccgtaccgaacaacagtatgaaaatgcgacccgcgatatcgccgtgctggaagatgccggcgtaccgtatcagctgctggaatccagccgcctggcggaagtggagcccgcgctggcagaagtggcgcacaaactgacgggcggcctgcagttacccaatgatgaaaccggagactgtcagctatttacccagaatctggcgcggatggcggagcaggcgggggttaaattccgctttaatacgcccgttgaccaactgctttgcgacggcgagcaaatctacggcgtgaagtgtggcgatgaagtgattaaggccgatgcgtatgtgatggcgtttggttcttactcgacggcgatgctcaaaggcattgttgatattccggtgtatccgctgaaaggctactcgctgaccattccaattgcgcaggaagatggtgcgccggtatccaccattcttgatgaaacctacaaaatcgccattacccgtttcgataaccgcattcgtgttggcggaatggcggagattgttggttttaataccgagctgttgcaaccgcgtcgtgaaacgctggagatggtggttcgcgatctctatccacgcggcggtcatgtcgagcaggcgactttctggactggtctgcgcccgatgacgccagacggcacgccggttgtcgggcgtacacgctttaaaaatctgtggctgaataccggtcacggcacgctcggctggacgatggcttgcggttccggtcagttgttaagcgatctgctctctggtcgcacgccagcgatcccatatgaggatctaagcgtagcgcgctacagccgtggatttacgccatcacgtccgggccatttacatggcgcacacagctaaggaaacgagatgacccgtccgatacaggccagcctcgatctgcaggcattaaaacagaatctgtccattgtccgccaggccgcgacgcacgcgcgcgtctggtcggtggtaaaagcgaacgcttacgggcatggtattgagcgtatctggagcgcgatcggggccaccgatggctttgcattgcttaacctggaagaggcaataacgttacgtgagcgcggctggaaaggaccgatcctgatgctggaaggatttttccatgctcaggatctggagatttatgaccagcaccgcctgaccacctgcgtacacagcaactggcagctcaaagcactgcaaaatgcgcggctaaaagcaccgttggatatttatcttaaagtgaacagtgggatgaatcggttgggtttccagcccgatcgcgtgcttaccgtctggcagcagttgcgggcaatggcgaatgttggcgaaatgaccctgatgtcgcattttgccgaagcggaacatcctgatggaatttccggcgcgatggcgcgtattgagcaggcggcggaggggctggagtgtcggcgttcgttgtccaattcggcggcgactctgtggcacccggaagcgcattttgactgggttcggcctggcattattttgtatggcgcttcgccgtccggtcagtggcgtgatatcgccaataccggattacgtccggtgatgacgctaagcagtgagattattggtgtccagacgctaaaagcgggcgagcgtgtgggctacggcggtcgctatactgcgcgcgatgaacagcgaatcggcattgtcgccgcagggtacgccgacggttatccgcgccacgcgcctaccggtacccctgttttagtggacggcgtgcgcaccatgacggtggggaccgtctcgatggatatgctagcggtcgatttaacgccttgcccgcaggcgggtattggtacgccggttgagctgtggggcaaggagatcaaaattgatgatgtcgccgccgctgccggaacggtgggctatgagttgatgtgcgcgctggcgctgcgcgtcccggttgtgacggtgtaacttgttgtaagccggatcggaggcaacgtcttctgggtgcaaaaaaatcatccatccggctggtcagcaactgtagttgttaatgtgacagagccattgcccatgatagtgtccattaaaaggatggacactatttccccggaacctgaactcaccgcacaggcgttctacataaaacgcttacgcttcattgttgactcgaactcgacttcagataaatcacgctttacccttgatggagcctgtacatagatttgtgtaattgcctgattttgatatgttcaattcaacatcaaatgaaggttaaattatggacgacaaacaattgcaggctcaggctgcgttcagcaaagcatcgcaaccggcgatagatgcttcattaaatttaagattcagcttcctcttcagccacccgtacgccaatcttcaacacttcattatcttctttctcggccaccgtccagatcatcccggcaaactctacctggtcaccgacaaccggtgccgcgcctaacaactgctggacaatttcacccagcgtttgctgcttatcacgatattctcgcccgtcttccaggccatatatcagcgcaacatcagcatatttggcgctggcttcgagaatgaagtcaccaaagaagcgttgatccagcgcgaccggcggcgactggctgaacagtttaccgagcgccggaagatcgcgttcccgaccaattacacacaacacatcgccttcgcgcagtcgggtgctgccggtaggatgaagcaactggttatcacgaaacagtgccgcaatacgcgtctcttttggcatatgcaaatcgcgcagtgccgcgcccacgcaccatttatcggcactcaattgataaacaaactgctcccacggattttccggatgaatatccaggccaacgcgtgacaccggacgtcccactggcggaaccaccactttggcttttttagccgcccacgagagtgatgttccctgcaagagcagtgaaaccagaaccacaaagaaggcgacattaaagaacagacgtgcattctccagccccgccatcatcgggaacacggccaggatgattggcaccgcgccgcgtaatcctacccagctgataaacacgcgctcacgcagattgaaaccgcggaaggggagcaatccagcaaataccgaaaggggacgggcgaagaatatcatccatgcggacaaaatgagcgccggaatggcaataggcagcagatcgcttgggttaaccaacagccccagcaccaggaacatggcgatttgcgccagccaggcgaggccgtcgaaattttgcaggatgccgtagcggttgcgaatagggcgattacccagcagaaaaccgcacagatacaccgccagaataccgctaccttccagcgcagtagttaatgagaaaatcagaataccgccacttaatgccagcaatggatataatccggcgggcagggcgatgcggttgatcatttgcagtagtaaataaccgccgccaagacctattacaatgcccagaccaaattgttgcagaatatcgacaatgaacatccagctaatattgctctcatgatgctggatcatcgcaatcagggtaatcgtcagaaagaccgccattggatcattactgccggattcaatttccagcgtcgagccaacacgttcgttaagccccttaccacccagcagagaaaagaccgctgcagcatcggtagagccgacgatagcgccgattaataagccttcaatcaaatcaagattaaacagccacgccgccatcatgccggttaaaccagaggtgataagcacgcccagcgtcgccagcgacagtgccggtcctaacgccacacgaaaggaactggcctgagtgcgcatcccgccgtcgagcaaaataatcgccagtgccaggttacttaccatgtaggcgaaggggtaattatcaaacgggataccgccgacgccatcgactcctgccagcatgccgatcgccagaaaaataaccagaataggaatgccaagacgggaagaaaatgaactaagtaatatactgctggtgacaaggatggatcctaagatgaaaaggctaattattgttgtggcatccaacggtcggttactcctgattacgctgtctcttatataaaccctaccatattagcggcagagacagcgttttacttagccctgaagcgtgatttttttacattttaagaacaggatgaccgctaatcgtcaactgagtgccttcccgggtgttattcagaatggcatgtgcgcccaacggcagcgtaaccgtgcgttgttcatgaccaaaatcgaggccggtaatgagtggaatcgacaggcgggaacgcaaaaacgcgtacactgactccaggttgtaacctgcgtcataatcattgggcgtgctgccgctaaagctaccgagaataatcgccttctgacgtggcaaaattcccgcatgatagagctgcaacagcatacgttcgacccggaaagggtgctcgttaatatcttccagcaccagaataccgttctcaatttttggcatccacggtgtaccgatcagtgaaatcagcatcgcaagattgcctccccacaacgtgccttcggcccgacatgtcgggccttccccttgccattcaatggtgaaggtttcattgcgtaacgccagccagaaatggtgctcggtaaaggcgttcagttcatccgcgccaaagtttgctaccagcatggggccgctaaaggtgatgacattgccatgcgccagaagaccgcactgaatggcggtaaaatcgctatgtccgcaaatgagcaacgggtcatgttgttggcgagccaccagtgcctgccagtcaatatctgccagtaaacgactggcaccgtaaccgccgcgtacagccagcacgatggtgttgggggtagtcagtctggcaagggaattgagatcttccagacgctctgtttccgtacccgcaaaacgctcacaacgacgggcaataacctcgacgttattgacttgatgccccgcgtcggtaaggcgctggataccacgcagcgcggcgtgctgtttaatgcagtaacccgatggggcaattaagtgaaacagagacatggcaattccttgctgacaacagaaacgaaatgtatatcatgccgcttaggtgtgccgttgtcacctcaacggcgattccaggctataaggatagaagaagtgaaattgagatggtttgcctttttgattgtgttattagcgggttgttcatcaaagcatgactatacgaacccgccgtggaacgcgaaagttccggtgcaacgtgcgatgcagtggatgccaataagccagaaagccggtgcagcctggggcgtcgatccacaattgatcacggcgattatcgctatcgaatcgggtggtaatccgaacgcggtgagtaaatcgaatgccattggtttgatgcagttaaaagcttcaacctccggacgtgatgtttatcgccgtatgggctggagtggtgagccgacgaccagcgagctgaaaaatccagagcgtaatatttcaatgggggcggcttacctgaatattctggaaaccggcccgctggcaggcattgaagatccgaaggtactgcaatatgcgctggtggtgtcatacgctaacggggcaggtgcgctgctacggactttctcgtcagatcggaaaaaggcgatcagcaaaatcaacgatttggatgctgacgagttcctcgaacacgtagcgcgaaatcaccctgcgccgcaggctccgcgctatatctacaaacttgagcaggcactggacgcgatgtaaatcagtcgcgcactttgtccgctttttcccgggcttctcgctcgagagagaaaataatccgctgtaattgccgctccaccgtcgggctgacgttaagaaaacggaagctcagacggggagtggtgatggtttcattcttgccatcaatcactttgcgctcgctgatggagattaactgggcgtcaaagtgaaaaacaccccattgcctcatgttgacttcaatctgagcgaagcgcatgccttcttgtaattcggcaggctttgctgtttccagtaatgcgcccatgccgcctaacgacaaatcatacaggcggaaacgtaacgtactgttatccgccagtttggtctggcaaaaataaggcggatggagtggggcggagatgcggaaatatcggcgtcgttgtacaaaccataaggtgggaggcggtacggtgataaatgccggaagctgcaagtattcactctgctgtagttgttcaacagtaaactcgactttcgcaccctgagtttcggcggtaatggtaatgtgctgtgcctttagcacggcgatgttgtcttcggcttgactgccgaaatccagcaccagtttatccggggttattgccagtattttgctgatcagctgcccgccattccaactgagacgcaaaggaattgcggctttgtgcaaatcgcgtaacacgtccaggacggctaacggattttgtttcaggaactgctcatggtaatgactcacgcggaaaaactcctgactgataaactgtctttggtttatcggtcacagttaacaaaacttaatacaaatgcgtgaatattttttacatgttgttcttaaatcagccgacatacgcccagcatcgatcccgcccttgcctatacttagagcgttgacgtaagcatttcttgcgtccgattcatcgaaacgagggcctgaacatgggaattattgcctggattatttttggcctgatagccggcattatcgccaagctaatcatgccggggcgtgatggtggtggatttttcctgacctgtattctcgggatagtcggtgcggtggtcggcggctggctggcgaccatgtttggcattggcggctccatcagtggttttaatctgcacagcttcctggtggcggtggtgggagctattctcgttctgggcatattccgcctcctgcgaagagaataagattttcataaggcggatagcgatacagatgccgctatccgctttcacatcagaacgtatactcgacacctgctttacgggtgaaaaaaatcaatatagcacttcgatatccgataaagtcggttcccggtaacaacaacagaatccttttttaattattgtttcgttgtttttggtgtgattcagaaaataaatattttagacagtagccagtcaggcgttaaaaatggggcggatagtgaggcggttttggctgcgcttattgaacatttagaattgatcaatccttctggcagattaagccaaaatacccgttcggcaatgcttcagttacgcgaagaggaatggtctgaattctttttttggttgctaaattctctggagtgtctggattatgtgattattaatttaactccagaaagcaaaaaaacgttgatgagtgaacaccgtaacaatattcaggtagcaattgatgctttatatagccaacgtcggcgtaaatcgccgggtgatgaaagtgaaacacttacccgtagaaatgacgctatcttcggcaaccacgtatggcaaacatttgcgcaatacttcccgccaggacttgaaaaaccgtctgtgtagaaaaaaccatagctatggtgttatctgccgacaacgccatccggagaagccgaatgacgttgtcggagtaagcgctggttaaggtgtgggttgtgcctctttggttgagggttgcgtcgttgctgacttaacggtcggacgcgtcgccggaacattgtcacacggttgctctttcgggcagatcaaatccagcattttcagcgtcacgccattggtccagccaaagccatcctgtaatggatattcgccaccgccgccccccgttccggtggtgctgacatcatatttttccaccagctttttctcccggtcataggtgtgctgaacattggtcaggaagtgccagctaatgtccatcgccacctctttttgcccgtagttttgtaatccttctgtcgcgacccactgtaacggtgcccagccatttggcgcatcccattgttgcccacttttcaccgacgtggtgttcaggccgccgggttgcagcagatgtgttttcgtcgccgtcgccattttgttggcgcgatctttcgctgccgcattgacgtacagcgggaacagggcggccgcggttaactgattgcgcactttatgacttatcaggtcgtaatcggcataccagccttgttgatcgttccacaggtatttttcgatccctttttgacgggcatttgccagcgtttcgtactggtttgccatcgcgttatctccggcagctttgctggcgcgggcgaggattttttccattttaaacatcaggctgttcagatcgaccggtacgatgctggtggtgcgtaaggtatttaactgctgcgggttgtccatccagcgcgagctgaaatcccagccagacgcagcggcagagcgcaggtcgcggtaaatttcagtggcaggtcgattcggattgcttttggcggtggcaatatcttccacccatgactctggtcgtggcgtatcgcgatcgtcccagtagcggttgagaagggtaccatcctgaagtttgacaacgcgtttttcctgttgtccggcttgcaggttttcaacaccgtccatccagtaagcatattctttttgcatttgcggcaggtattgcttcaacgcggcatcgccttcatgctgcgccagtaactctaccatcagggcaaagaagggcggttgcgagcggcttaaatagtaactgcggttgccgttgggaatatgaccgaaagtgtctatttcatgagcaaaattggccaccatatccgcgactttatcccagtgaccgctttcggcaagtcctaacatggtgaagtaactgtcccagtaatatacctcgcgaaaacgtccgcccggcacgacataaggttccggcagcggtaacagagaatcccatttttcggtgttttcggtagaacgcgttaataccggccaaagtccgtcaatatgttcgcgcagtgactgtccctctggcggaacatatttctcgccctctttcggcagggtgaaattgacgttaacgaaatggcgcagatcaaatccgctctggttttgctgcatccgataatcagcaaggatcatcagcggatcgctgttcggcacggcatcggcaaaggttttttggtccggaaaaagtttggcgttttgcacatcattaaacagcggccctaataaaatatcaggcggctgtggtgttaccggtgtttcttctgcctgcaccgatagcgcagcgaaacacaaaaagatgcaggctggaattaacgccattttttgcgggcgagaaggtgcgggggatttcatcaatcattctcctttggcgaaaccgaataaaacggtattcaagtatcagaaaaccttagttcaggatcgcactagctgcatgatcgaaatctcattctgcgaactgtcaggcattttagaaaagggaattaaagggataaataacggcgaaatagagtgatcaaataacgtctgtttattagccagccagcggcgttgggttcgtgattagcgaagaaaaatcatcataaattggtgaaaaatataacaggtatttaaaaatcattagtgctgggtaaattgccggatgacatcagaacgatgccatccgaacggtggcttaaccctgacggttgaaacgttgcgttttaacgtccagcgttagcgtttcttctggttgtatcgcatacagtttctcaccctgctggcaaatccagccaatccccagttcacgggcgattagggcgctgtgggataccggacttccggcgctaaggcagataccttttacaaccgccggatccagttgcagtactgtggaaggataaatgttctccgccagtagaatagttggcgagttaaactgcgggagttcttctttcgtttgggtcaggtggaccagggtgcgatgcagaagatcgtccacatcaatatagcgaacttgtagatattcatcatccagttgctggtattgctggctaagttctttaagaacttgctgccaggcatattctgccgtgcaatgttcatgctgaaggagttcgcttgccgccgccagcagttccggatcatctaacagtgtatggtgaccagaaaagattgcggcaatatcgtcaagcccgctggcttctgctttcgctgttaacgtcatcagatctaataacgtgaagtcaatagcctggcgtaatcgttcttgttcttcttccacggtcagggttgattttgcctgtaccgtacataaaactggttgataataaaaggctttacccgaaacaggcggaacgggacgcagagtaggtggagcgacttcctccgtttcaccaaagttatcttcagccagctgacggaaagcgatcagtgcctcttcagcttctggccctttcgcaatcaggcgcagcgtatcgttatagcgaacttgtagtaacgcaatctggttaatactctctggtgtgacgcatttgccgtttttttccagcaacatatcggcattaaatgtcgataaggtataaaccagccgggaggccggacgtacatgcaggccgttacggttttttatgaccaccgccagagaacgggcttcttcatcgtacgcaggacatgtgtcagagatttcagtgtcggaggacggtaaacccagttgttcacgtttggcttccagcgcatgcatagcgtcaaagataactttgtcgatatccgctcccgaggccgcgctgaccgttgctgccagtgtaccttcgaccaacggcgcagcacacaaacgtacttttgcggcgatctcgggagccagcaattccagcgcagtttcagcactcaataatgcgctacccatatccatcatgaccagcacatggtcggcatcagcaacagattcgatggcctccatcactttgacggcatcggtaccaatgggattttgtggatcgtcaattcccgcggcaatggcgattttacaactatcactcattaacatctgacgggctaattcaccgacaccttctcccagtcggctgctatgtgaaactatgaccaggtttaccatcaccaattccttactcttttgcggctaacgccaacatttgcatcataaacatcaccgaggtcgcgccgggatcctggtgaccaatactgcgttcaccgagataactggcgcggcctttgcgggcttgcatcgtaatcgtactttgtgcagcggattcggcgatgctactggcagcttcgagcgccgccggaacagagagattttgctcgctggactgacgtaacgattccaccaccggcacccacacatcacacatggttttatcgccaggttcggctttcccgcgactgattacgccgtccgcgccatcgcggaacatctgataaagctcttccagcgtcaggctttgccgtgcctgggtcgcctgtgcggcgcggataaagaaggtaccgaacagcggaccactggcaccaccgacgctggaaagcagcgtcataccggtattcttgagaatgaaaccgatatctttatctgcgatagcagggagtttttccactactttgctaaagcctcggttcatatttagcccgtggtcagcgtcgccaatttcgcgatccagtccggtaagatactcgctctcggtgctgaaaatatcgccacaacgagtgagccagttaacaatttgagttctgctcagtgacattgctttctccttatttaccccagttaagggccggggtgtggaccggggcgtcccagagtgccagcgtttcgtcatcaactttcagtaaggtgattgagaaaccggtcatatccagtgaggtgcagtacgcgccaattaaattacgttcgatagtcaatcccgcttgctggcaacgtgtggtcaggcggttatagacgccgtacagctcagaaagcggagttgcgccaagattgttaaccagcgcaatcacccgatcgccagactggagcggttgtttggtttgttgttcttcctgccaactgccttgttgataatcccagaaacgcaaagtgcgatggtatgagccattttccagcagggtgtcgaacatttcatcgacggtttgatcaagggaagagaaggagcggcggtcaatacccggctcaccatgaatgccgacgccaaactccatctcattatccgccagggtaaaagaaggtttgcccgcggcaggaacggtacaggcaccgagagcgatacctattgagtggccttgattattcaacttacgccccagttccgcacaggcgtccagtgagtcgccacgctcggccgctgcgcctacgagtttttcaattaatacggtgttggcaacgccgcgtcgcccggcggtataaagactgtcttttactgcaacgtcgtcatcaatgaccacagtggtcacgtttacgccgctatcgtgcagtaactcggttgctgtttcgaagttaagaatatcgccggtgtaatttttgataatcaacagtacaccttcgccgccatcaacttgcatggcgcattcaaagattttatcgggcgtcggtgaggtgaaaatttcgcccggacaggcccccgaaagcatcccctgaccgatataaccacagtgcatcggctcgtgtccgctgccgccacccgacagcagggcgacttttcctgtaacgggggcatcagctcgggtgacatacaccggatcctgatgcagtgtcagcgatggatgtgctttcgccagtcctgccagttgttcgtccagtacgtcttgcacatcattgatcaattttttcattattttgctccagcaattacggtagggcatggatgatgttcaacgacacggcgaccactgactgccgatgaatccattgtgcatcaggcaagggaaaagaaaattagcccaaattatgtttcatagtgaaacatatgctttaatgaatgttccatattgaaacttttacgtgtattaatacttaaaattgcgagccggaacaccttttgtcataagggatgcgggatatgagtggcgcttttaacaacgatggtcggggcatatctcccttaattgcaacctcctgggagcgatgcaataagctgatgaaacgggagacatggaacgtaccacatcaggcccagggcgtgacatttgcttctatttatcggcgtaagaaagcgatgctgacgctcgggcaggctgcgctggaagatgcctgggaatatatggcaccgcgagagtgtgcgctgtttatcctcgatgaaaccgcctgcattctcagccgtaatggcgatccgcaaaccttgcagcagctaagtgcactgggattcaatgacggcacgtattgcgccgagggaattattggtacttgtgcgctatcgttagcggctatctctggtcaggccgtgaaaacgatggccgatcaacatttcaaacaggcactctggaactgggccttttgtgcaacgccgttgtttgacagcaagggccgattgacgggaacaatagcgctggcgtgtccggttgagcaaactaccgcagctgatttgccgttgacgttggcaatcgcccgcgaggtcggaaatttactgctgacggacagtttgctcgctgaaactaaccgtcatttaaatcaacttaatgccctgttagaaagtatggatgatggcgtgattagctgggacgagcagggtaatttgcaatttattaatgcccaggcggcgcgggtcttgcgccttgacgcgacggcaagtcagggacgggcaatcactgaactcttaacgttacccgccgtattgcaacaagcaataaaacaggcacatccgctcaaacacgtagaagcaacctttgaaagccagcaccagtttattgatgcggtgataacccttaaaccgataatagaaacgcagggaaccagctttattttgttgctccatcctgtggaacagatgcggcagttgatgaccagtcaattaggaaaagtcagccataccttcgctcatatgccacaggacgatccgcaaacccgccgcttgattcattttggtcgccaggcggcgcgcagtagctttcctgtcctgctttgtggagaagagggcgtgggcaaggcactgctaagtcaggcaattcataatgaaagcgagcgtgctgcaggtccttatatcgccgtcaattgtgagttatatggtgatgctgcgctggcggaagaatttattggtggcgatcgcacggacaatgaaaatggccgtctgagtcggctggaactggcacacggcggcacgctgtttcttgaaaagattgaatatctggcggtggagttacagtctgctttgcttcaggttatcaagcagggggttatcacgcgactggatgcgcggcgtttaataccaattgatgtcaaagtgattgcaacaacgaccgcggacctcgcaatgctggtggaacaaaatcgttttagtcgccagctgtattacgcgctgcatgcatttgaaattaccatcccgcctctgcgtatgcggcgtggcagcattccggcgctggtgaataacaaattacgcagtcttgaaaaacgcttctctacgcggctgaaaattgatgacgatgccctcgctcgcctggtttcttgtgcatggccaggcaacgattttgaactttacagcgtcatcgagaatcttgctctgagtagtgataacgggcgcattcgcgtcagtgatttgccggaacatctgtttaccgagcaggcgacagatgatgtcagcgccacccgcctttccaccagtctgtcatttgcggaagttgaaaaagaggcaattattaacgcagcccaggtcacaggcggtcgcattcaggaaatgtcggctttacttgggatcggccgcactacgctgtggcggaaaatgaagcaacatggcattgatgcagggcagtttaagcgccgggtatgaaagacagaaacgatttctgatacatcagagtgatctgtatttcattccggcgcacgctaacaattttcagcatcgtttaagggcttgtctatcccgcacttaaaagctgaagcgatatcctccgttgacttgcttctgatcaaagaggttaccctgcgtgtaatccgcttcgagatagaatgtgtgctgtttgttatactgtgcactgactcccacgccgttattccagccattacctttgaaactgtacttctcccgggagttgttcaacagatattcggtatcccctgaaaactcgcggatagcgccagtcttcacatagacattcagctggctgttgcctgcggtgatgtcataccccagtatcatgctggcacgccccagcagcgattcgtagtgattcagatgtatattgaggccattactcgccttcatagtcatctcattctggtggctgtatgtaagctgggtttgcggctctatatagaacccataaccagtaggggacaggttgaacctctgcccggcttccagggagatgctcattccattcgcagtgccgttggcgttaacgccgttgttctgactgtccagtacgtggaaactatttttctggcgcgatgcttttataacgagatcgctgtaaaaaccgttttgtgccatgtaactggcgtacattcccatgtagtctgaacgtgcggtaccgtcgcctccgctatagtccggcgatgcatgtgttgagccaatatacagaccgacatacaacggcattacatcagagagacgtttatccccaccaaactggataccgctgtaacccatgtcaaagccgctcagtttgccactggcaaaggagtccaggcttcccccataactgcgcaaccagatattaccgtctttactctgatttcgcaggtcacccatccgttgcatcagcgtacggttttcaacatagttcaataagtaaccgacattgagataattgccgccagcatctgcggtcgtggtgggtttaggcgtgggagcgggttcaggcgtaggatcggggttgactatgggaggctgagcgggagctggtgtgggttcaggattaggagtcggttccggaactgtcccggaagcgtaaagctcccagttagtgccatttttacgcacatcgtacagatatccccccaactcaacctgagaagacgcgctgaacgaggccgcgccgtcagtggtttttaccactgtcagaacttcatttcccgttgtggcctcgctgccctggttgcggatagccaatacgtgattaccagcactactcccgctgatattcaataaatcccctttattattaacgccattaccctcgccaacaacatcagcacgcataataaaggtactgttaccgctcaggttctctacgtttaatgtggcaaatgtgccggcagttgacccgtggctggcaaaatcgacagttgaatggctcagcgccagcgtgtcgagattagaattacttgttacgttccagacgctgttattcattgcaacgtccagttttccgccattgacattatcgctgagggaggaacctgtccaaaccgacccagggtgcatatccagattgattagcccacctttggaaagaacgctaccgttgataagcatacgacccgaggcgttgatgcggctggcggcataaccatcgtcatgttgcgttgcgatggccatctggtcgggtgtactcatatcaatgaccagatcgctcgtgaggtcgatctggctgttggtcatggcataaattcccctggctcctgccgcgccggtgatagccaaactgtctccggttattctaccgccgctgagcgcccacaaacccagcgccagactgccattacgatcaactgtaatatcggtattttgcatgttgacaacagccgttgccgtctgggccgaggcaccataagaaccgccggaaaagatgctgtttcgttgcgctgccgtgccagtaaaattgattatcgcgtctgaaccactggtgacgaggccaccgccctgcgcggaagaaatatggctatctgcaccgatagtggttgtaccaccacgaacttcgacgccattggccgcggctccagttacatcaacagtgagtgcattcgcgctaacctggccaaagctccagaggccgtgagcattatcgccattggttttaatggtactgtttgttccgagatcgacaacagagtttttctgtacgtttatccccatggcgctgtagccctgaacatcgattgtcaggtctgtagccgtaaaacgcgcagcaccattggcgttattgccgttgagaccaccgatataaacacctgtacttccatcggtcgtgattttacttccgcttccaagatcgacactggtgccatagtcattgatggttaggcctataccgttcgagttttcaatggtgaattgagtggctgttagtgttgagctatgcccaataatgatgccgtcatcgttactcttaatggtgctgcctgtgcctaagtcagcatgggtatagtcaccaattaagttaatgccgatggcagaggtttgaccaacaacatctactgtgagtcggttagctgtcagggagctgtttttgccctgaataatgattccttttgcatatccagaggcgtcgttgacattgacggtgacatcattacccaggttgatattgccaggcgtgtttcctgctggggtcattacaccatagaggtttcctgatggatcggcggtatctcctgtaattctgtcaccatcattaatagtaatattggtgccatattgacttcctgtatcagcagctatcagcaggggggaaaagataattgcattcaaaccaatagcgccaaattttatcagttgaattgagggcgaacggatttttaattcagcgagacgatctgctttggtattcccattgtgttgtttgatgcccataccactcctgtatagtacccagactatgggtctatggattttgtcattttgtttaaatcaatgaataatatcctcttatcatcatgatatttgtatggtgcaatcatgatgagcttctcagagaataattctctattaccgggcaaaatcaggaacacaggaattaatatatatttaacatcccccttacaaaggtgagtttatatcgagttattccctaagttgtcgttacttattccaattcgttactataaatatggcaaaaatattacaacaaacagcggttaaaaaatttggtgaagattttttgtaataatcctaattagttatgggaatttcgcttgatgtatctgcataacaaaaacaatatgcgccatttttgcattactaataagaaaaagcaaaaaacatcgatattcatttttggtcaatgggttttctggcctatcgttgttattgtgctactggttatcattttcatcttgccagcatattggagcgtgatcaattttgatcagctgtgaagggggctgatgtgtagtgatacaaaaacttacgttatatcactgctaatgagatatccgtcatctgaacacttatgtctttaattattctcgtggttcactataggcaataagcacaaaagtgtaggatgttacaagaatgattaggactcggtgaaatgaaaaatccacgcaattgcgtggattttatatacttttgcgctcttcatgagatttagcgaaacctcatgagacaataaattaattagacgttgaaaaggaagttcatcacatcgccatctttcacgatgtaatctttaccttctgcacgcattttgcctgcttctttcgcgccttgttcacctttgtaagtgatgaaatcttcaaacgagatggtttgtgcacggataaagcctttttcaaaatcagtatggattttgcccgctgcctgcggcgcggttgctccaaccggaatggtccatgcacgcacttctttcaccccagcggtgaagtaagtttgcaggttcagcagtttataaccggcacggatcacacggttcaggcccggctcttccagcccaagctcctgcataaactcgtcacgttcttcgtcgtccagttcggcaatgtctgcttcaacagcagcacaaaccggaaccacaacagaaccttctttcgccgcgatttcacgcacctggtcaagatatgggttgttttcaaaaccgtcttcgttgacgttggcgatgtacattgttggtttcagcgtcaggaagctcaggtaacgaatagccgctttctcttcagcgcttaaatccagcgcgcgcagcatacctgcattttccaactggggcaggcatttttccaggaccgccagctcagctttcgcgtctttatcgccacctttggctttcttctgtacgcgatgaatcgcacgttcgcaggtgtcgaggtctgccagcgccagttcggtgttgataacttcaatatcgtcagccgggttaactttgccggaaacgtgaatgatgttgtcattttcaaagcagcgaacaacgtgaccgatcgcttcggtttcacggatgttggtcaggaactggttacccagaccttcgcctttcgatgcgccttttaccagaccggcgatatcgacaaattccatggtcgtgggaagcgtacgctgcggttttacgatttcagccagttgatccaggcgaggatcaggcattggtacgacgcctgtgttcggctcaatggtgcagaatggaaagttggccgcttcaataccggctttggtcagcgcgttgaacagggtagatttcccgacgttgggcaaaccgacgataccgcatttgaatcccatgatttaaatcaccttaatatcttaataatcaacctgttattgctaacagattgcagaaatggaaataactttgcctattatacacggcactcggcaaaaatgccgcagacaacgacttattgcgctttaaaggcgtgcaatcggttcgttgctttggtcaagccatctgtaaaccacatttcagtacaacgcgccgcttcgtcaatggcttcatcaattaacttctgttcactaacaggcggtttgcctaacacaaaaccgacaactttatttttatcgcccggatgaccgattccgatgcgtaaacggtgaaagttagggttattacccaatttactgatgatgtctttcagtccattgtgaccaccatggccaccgcccaatttaaatttggcgacgccaggaggcagatccagttcgtcgtgggccaccagaatttcgtccagattaatgcggaaaaaactggccatcgccgcaacggctttgccgctgagattcataaatgtagtcgggactaacaggcggacatcttcgcctccaagagtgactcgcgaagtataaccaaagaatttagcctcttcgcgcagcggagcgcgcaaacgctctgccagtaagtcaacgaaccaggcaccagcattatgtcgcgttgcggcgtattcagcaccggggttcgccaggccgacaatcaatttaatcgtcacgtttttttgtcctgagtgtgtacataactggcgcgtagtttactggttgcggccccgcttgacaaaaaactgcgtatcaaatgcagataacgtaataattgcctgagtggactattagaaagtcaaggtgttcaggcgtttatttgtaaagttttgttgaaataagggttgtaattgtgatcacgcccgcacataacccactgggtgttgtctatactttacacataaggaagaggggtattccctgttacaacccagaaagttccggaggtgacatatgaaacgcaaaaacgcttcgttactcggtaacgtgctcatggggttgggtctggtggtaatggtggtcggcgtggggtattcaatcctcaaccagttaccacagtttaatatgccccagtatttcgcacatggtgcagtgctaagtattttcgtcggtgccattctctggctggcgggtgcccgtgttggcgggcatgaacaggtgtgcgaccgttactggtgggttcgccactatgacaaacgttgccgccgtagcgataatcgccgtcatagctaacaaataatgcagtttgctgaccagtcagtttgcgctgactggtcaatctcgtacttataaatccgccatcgccgcgcgacgattcgggaagaacgccaggcgtcccgggatcggttgaatgccagcgcgagccatagtgcgcagtggctggaattccacgttgcacacgcgcagttcacatccctcgggcagacgcttcacaaaacgctggaacgcatcaagaccaccagcatcaagtaccggaacggcatcccacttcagaatcacaatccgtttgccttcaagacgtgactccaggtccgtgaataagccttcagcagcagcaaaaaacagcgggccaataacgcgcagaaccaggacatcgtctggaacatctacgactaccggtgccaggcgagtcatacgtgcgatacgacgcataaacagcagcgatgccagcacgatccccacgctgatggcaataaccatatcaaacaacacggtcagcgacatgcacagcagcatgacgatgatgtcatctttcggcgcatgacgcagcaagtcgaccactttgtgcgcttcactcatgttccacgccaccatcaacagcagggctgccatggcggaaagcggcagccaggagagcagcggtgccagtaccagcagggcaagaataaccagaatagagtggatcaccgccgagataggggacgttgccccggcacggacgttagcggcagaacgcgcgatggcagctgtagcggtaataccaccaaagaacggagcgataatattccccagtccctgtccaaccagttcgctgttcgccttgtgtttcgtcccggtcataccatccagcaccacggcgcagagcagagattcgattgcgccgagcattgccattgagaatgccgcaggcagcagtgtgcgaatagaatcccaggttagcgtgaattctgaattaggcagatcccacggcagcaccagttgcggcagcagttgcggaataccgttaccctgagaaccatcggccaggacgtagtggaattgcgaaccgatggtagcaacatgtccgccgagcaggttaacaatccccatcaccgcgcaaccagccagcaaggccggaaggtgaccgggtaaacgaatgcccagacgcggccaaaaaacaagaatacctagcgtcacaatgccaatggcagcatcacccacattaatggtcggcagcgccataaataatgcgccgactttttgtagataatgttccgggacatgggccatttgcagaccgagaaaatctttaatctgcatggtaccgatggtgatcccgatacccgaggtgaaacctaaggtgacggaaaccggaatatactcaatcaggcgaccaaagcgtgccagacccatcagaatcaaaaagatccccgacagcaaggtcgcaaccagcagtcctgccagtccaaactgttgcgacacgggatagagaattaccacaaatgccgcagtcggaccggaaacgctaaagcgtgacccacccgtcagagcaatgacaatccccgcaacagctgcggtatataaaccgtactggggtgccacaccactaccaatagccaacgccatcgccagcgggatagcaataatcccgacggttatcccggcaatcaggtcacgggtaaaccgtgcggcagtatatttttctttccagcaagcgtcgatcagagcgcggaaaggcatcacatgtgaggaaaatattttgttcacaataatgtttcatccgtgagcgcatcatctgtcaactaaatggcaggtgaaggaggcataggtcatacaaatggatattacagacaaaaaaacccgccgcagcgggtctttgagccgggttcgattagtgttcgaacatggcagagatcgattcttcgttgctgatacgacgaatcgcttcggccagcatacctgacagggtcagagtacgcacgttcggcagtgatttgatttcatcgctcagcggaatggtatcgcagacaacgacttcatcaattacagagttacgcaggttgttcgccgcgttgccagagaagatcgggtgagtcgcgtacgcaaatacacgtttagcaccacgttctttcagagcttcagcagctttacacagcgtaccgccagtgtcgatcatatcatcgaccagtacgcagtcacgacctgcaacgtcaccgatgatatgcatcacctgtgaaacgttcgcacgcggacgacgtttgtcgatgattgccatatcggtatcgttcagcagcttagcgatagcgcgggcacgcacaacgccgccgatgtccggagaaaccacaattgggttatccagattcagctgcagcatgtcttccagcaggatcgggctaccaaatacgttatcaaccggaacgtcgaagaaaccctgaatctgttcagcgtgcagatccactgtcagcacacggtcaacaccgacgctggagaggaagtctgcaaccactttcgcagtgattggtacacgagcggaacggacgcgacggtcctggcgcgcatagccaaagtaggggataacagcggtgatacgacctgcggaagcacgacgcagggcatcaaccataacgactaattccatcaggttgtcgttagtaggggcacaagtggactggatgatgaaaatatcaccaccgcgtacattttcattaatttgtacgctgacttcgccatcgctaaagcgacctacagcggcgtcgccgagtgaagtgtacaggcggttggcaatacgttgtgctagttccggggtggcgttaccagcaaaaagcttcatatcaggcacgagaagaacctcaggcatgcgtccattggtggaaagaatctgccgaaaactgtgcgggccaggcatgatcctttccaggcggtgtattaaagagcgcgatgcaacgtctggaacaaggtgacgttgtcaccgaaactcagcttgcccggcttaaagcatggctctgtgcaatggggaaagattagcgcctttcgccacaaagccattgagccattccggggcttgctctagcacctggcgggcttcagactctgtatcaaattcagcaaagacacaggcccctgtcccagtcaggcgcgacggggcgtattctaacagccaggaaagcaccgcatcaacctcgcgaaaacgttttcttgcgataacctcgcaatcattgctgaattcacattttagcaacgtttctattgacctttttggcgtattgcgcgggagttcaggatctttaaaaatcaccggagtcggaatacttacaccagggtgcgccaccagataccacttctctggcggatccaccggcgttagtatttcaccaacgccttcggcaaacgcggcatgcccccgaacaaagacaggaacatctgcgcccagcgtcagccccatttccgccagctcatccatgcttagcccgcattgccagagatgatttaatgccaccaggaccgtcgcggcattggatgaaccaccgccgagaccgccgcccatcggcaaacgcttatcaatgctgatatccgcaccgcttcccgtcggaagacgcccgctgtctgccgcagttttcatcaacaaccgcgctgcgcgaacgatcaggttatcttcatgttccacgccttcaacgggcgttaacagacgaatatccccatcgtcacgaagctcaatgctgatggtgtcgccgtaatcaagaaactgaaacagcgtttgcagcgtgtggtaaccatccgcacgctgaccggtaatgtataaaaacagattaagttttgccggagagggccactgtgtccgcattatttcactatccagttatccatttttaacttgatgcgttgaccaccgtcggtgagttccatattggctggcatcgcaggttgcgttttggtgtcataaccaccataaacaaccttccagtttttgccattctggctgtaggtaatttcgctcaggcggtactggtcgtccagtttgtagtcggttgcatcacccggtaaacctaaaatccactggcgcaagctgttgagcggaattggcattccggtcaatttgccaatcatctcttcggcgtcatcggcggtataacgctgacctttattgtcgactaactgcacgttacccggttgagcattcagctccagttccgtgctgcccaatgggttagtgagcagcagacggtagcgatcctggccggtttgctgccagaaaaagcgggcgtacactttttgttggtcagaaatataagcgaacgcgccgcgagtctgatactgattaagattgcgcacgtcttgctgatgctgacgccattgtggcgaatccgggcttttgccaggacctttgggcgtggtaacggaacaggcagtgagcacaagagcagccagcggtagcaggcggataagacgaaaatcgggcaggggcatagtgatgacaagtccttgagatacgttgcagttataacccttaatgctagcgttaccgtccgctatcgtctatgttcaagttgtcttaattgccagaatctaacggctttcggcaattactccaaaagggggcgctctcttttattgatcttacgcatcctgtatgatgcaagcagactaaccctatcaacgttggtattatttcccgcagacatgacccttttagcactcggtatcaaccataaaacggcacctgtatcgctgcgagaacgtgtatcgttttcgccggataagctcgatcaggcgcttgacagcctgcttgcgcagccgatggtgcagggcggcgtggtgctgtcgacgtgcaaccgcacggaactttatcttagcgttgaagagcaggataacctgcaagaggcgttaatccgctggctttgcgattatcacaatcttaatgaagaagatctgcgtaaaagcctctactggcatcaggataacgacgcggttagccatttaatgcgtgttgccagcggcctggattcattggttcttggggagccgcagatcctcggtcaggttaaaaaagcgtttgccgattcgcaaaaaggccatatgaaggccagcgaactggaacgcatgttccagaaatctttctctgtagcgaaacgcgttcgcactgaaacagatatcggtgccagcgctgtgtctgtcgcttttgcggcttgtacgctggcgcggcagatctttgaatcgctctctacggtcacagtgttgctggtaggcgcgggcgaaaccatcgagctggtagcgcgtcatctgcgcgaacataaagtacagaagatgattatcgccaaccgcactcgcgaacgtgcccaaatactggcagatgaagttggcgcggaagtgattgccctgagtgagatcgacgaacgtctgcgcgaagccgatatcatcatcagttccaccgccagcccgttaccgattatcgggaaaggcatggtggagcgcgcattaaaaagccgtcgcaaccaaccaatgctgttggtggatattgccgttccgcgcgatgttgagccggaagttggcaaactggcgaatgcttatctttatagcgtggacgatctgcaaagcatcatttcgcacaacctggcgcagcgtaaagccgcagcggttgaggcggaaactattgtcgctcaggaaaccagcgaatttatggcgtggctgcgagcacaaagcgccagcgaaaccattcgcgagtatcgcagccaggcagagcaagttcgcgatgagttaaccgccaaagcgttagcggcccttgagcagggcggcgacgcgcaagccattatgcaggatctggcatggaaactgactaaccgcttgatccatgcgccaacgaaatcacttcaacaggccgcccgtgacggggataacgaacgcctgaatattctgcgcgacagcctcgggctggagtagcagtacatcattttctttttttacagggtgcatttacgcctatgaagccttctatcgttgccaaactggaagccctgcatgaacgccatgaagaagttcaggcgttgctgggtgacgcgcaaactatcgccgaccaggaacgttttcgcgcattatcacgcgaatatgcgcagttaagtgatgtttcgcgctgttttaccgactggcaacaggttcaggaagatatcgaaaccgcacagatgatgctcgatgatcctgaaatgcgtgagatggcgcaggatgaactgcgcgaagctaaagaaaaaagcgagcaactggaacagcaattacaggttctgttactaccaaaagatcctgatgacgaacgtaacgccttcctcgaagtccgtgccggaaccggcggcgacgaagcggcgctgttcgcaggcgatctgttccgtatgtacagccgttatgccgaagcccgccgctggcgggtagaaatcatgagcgccagcgagggtgaacatggtggttataaagagatcatcgccaaaattagcggtgatggtgtgtatggtcgtctgaaatttgaatctggcggtcatcgcgtgcagcgtgttcctgctacggaatcgcaggggcgtattcatacttctgcttgtaccgttgcggtaatgccagagctgcctgacgcagaactgccggacatcaagccagcagatttacgcattgatactttccgctcgtcaggggcgggtggtcagcacgttaacaccaccgattcggcaattcgtattactcacttgccgaccgggattgttgttgaatgtcaggacgaacgttcacaacataaaaacaaagctaaagcactttctgtactcggtgctcgcatccacgctgctgaaatggcaaaacgtcaacaggccgaagcgtctacccgtcgtaacctgctggggagtggcgatcgcagcgaccgtaaccgtacttacaacttcccacaggggcgcgttaccgatcaccgcatcaacctgacgctctaccgcctggatgaagtgatggaaggtaagctggatatgctgattgaaccgattatccaggaacatcaggccgaccaactggcggcgttgtccgagcaggaataatggaatatcaacactggttacgtgaagcaataagccaacttcaggcgagcgaaagcccgcggcgtgatgctgaaatcctgctggaacatgttaccggcaaagggcgtacttttatcctcgcctttggtgaaacgcagctgactgacgaacaatgtcagcaacttgatgcgctactgacacgtcgtcgcgatggtgaacccattgctcatttaaccggggtgcgagaattctggtcgttgccgttatttgtttcgccagcgaccttaattccgcgcccggatacggagtgtctggtggagcaggcactggcgcggttgcctgaacaaccttgccgtattctcgatctcgggacgggtaccggggcgattgcgcttgcgctggctagcgagcgcccggactgcgaaattaccgctgtagatcgtatgcccgatgctgtcgctctggcacaacgtaatgcccagcatctggcgatcaaaaatatccgcattctgcaaagcgactggtttagtgcgctggccgggcagcagtttacgatgattgtcagcaatccgccgtatattgacgagcaggacccacatcttcaacaaggcgatgtccgctttgagccgctcactgcgctggttgcggcagacagtggaatggcagacatcgtgcatatcatcgaacagtcgcgtaacgcgctggtatccggcggctttctgcttctggaacatggctggcagcagggcgaagcggtgcgacaagcatttatcctcgcggggtatcatgacgtcgaaacctgccgtgactatggtgataacgagcgcgtaacgctcggccgctattatcaatgacaagtttttctacactgcttagtgttcatcttattagtatcgcgctttctgttgggctattaaccttacgtttctggctacgttatcagaagcatccacaggcatttgctcgctggacgcgcattgtgccgccggttgtcgatacgctgttattgttaagcggcattgcgttgatggctaaagcgcacatcctgccattttccgggcaggcacagtggctgactgaaaagctgtttggagttatcatttatatcgttttgggttttattgcactcgattatcgtcgtatgcacagtcagcaggcgcgcatttttgccttcccgctggcgttggtggttctgtacatcatcattaaactcgccaccacaaaagtaccgttactggggtaagtcatgagatcgttagctgatttcgaatttaataaagcgccattgtgcgaaggcatgatcctggcttgcgaagcaatccgccgcgattttccctcgcaagatgtttacgacgaactggagcgtctcgttagtctggcgaaggaagaaatcagccagcttctgcctttagaagagcagctggaaaaactgatcgcgctgttttacggcgactggggatttaaagcctcacgcggtgtttatcgtctttccgatgcattatggctggaccaggtgttaaagaatcgacagggcagtgcggtatcattaggtgcggttttattatgggtcgcgaatcgtctcgatttgccgctgctgccggtgattttccctacgcagctgatattgcgcattgaatgtccggatggcgaaatttggctgattaatccttttaacggtgaatcgttaagcgaacatatgctggacgtatggttaaagggaaatatcagcccgtcggcggaactgttttatgaagaccttgatgaagctgataacattgaggtaatccgcaaattgctggatacactcaaagcctcgttgatggaagaaaatcagatggagctggcgttacgcaccagcgaagctttattacaattcaaccctgaagatccctatgaaattcgcgatcgcgggttgatttatgcgcaactggattgcgaacacgttgcgttgaacgatttaagttatttcgttgaacagtgtccggaagacccgatcagcgaaatgatccgtgcgcaaataaataacatcgcgcataaacatattgtgctgcattaattaatcgacattttactcaagattaaggcgatcctatgaaacaaaaagtggttagcattggcgacatcaacgtagcaaatgacctgccgttcgtactgtttggcggtatgaacgtgctggaatctcgcgatctggcgatgcgcatttgcgagcactacgtaaccgtgacccagaaactgggtatcccttacgtgttcaaagcctcttttgacaaagccaaccgctcctccatccactcttatcgtggaccgggcctggaagaagggatgaaaatcttccaggagttgaagcagacttttggcgtgaaaattatcaccgacgttcacgaaccaagtcaggcacagcccgttgctgatgtcgtggatgtgattcagttgccggcgtttcttgctcgccagactgacctggttgaagccatggcgaaaaccggtgcggtaattaacgtcaagaaaccacagtttgtcagcccgggacagatgggtaatatcgttgataaattcaaagaaggcggcaacgaaaaagtgattctttgcgatcgcggtgctaacttcggctatgacaacctggttgtcgatatgctgggcttcagcattatgaagaaagtgtctggtaactcgccggtgattttcgacgtgacccacgcactgcaatgccgcgatccttttggcgcagcttccggcggtcgtcgtgctcaggtggctgagctggcacgagccggtatggcggtaggtctggcagggctgtttattgaagcgcatccggatccggaacatgcgaaatgtgatggtccatccgcgctgccgctggctaaactggaaccgttcctcaagcagatgaaagcgattgatgatctggtgaaaggtttcgaagaactggataccagcaagtaatctttttgtttgaaaaataaagtcttagcgttgtgcgttaagacttttttatgggtgccggatacaaaaaaggccgcaggctgttacccctgcggccggtttcgggcgcatattgccatcacggcagcctgacgcccgttttcaccttacttccggttacgccaccagccgacaatcgctgcggtaataattcccgccaggatcggtgctgccaggtcgtcccagaaaatcatggcaaactgcgcgagcgtcatatagccgccttgttgtaatgacaacattttgcggctattcttgaattgttctggttcaagattagcccccgttctgttgtcaggttgtacctctcaacgtgcgggggttttctctttccagcaaccaatgccaccagggataaagcccccgcaacattgcgcctcaccggataacgccggcttggtgtggatactacgactcaattcatcttcacttcatccctgaaatgtttgcaatgaagagtgcattccggtttttcaacagctgttacagtcgtttcatgagtgctctggatgaggcttccagctcgggttgccaatatttacttgtggaagtgataaagacaaaaatggccgcaggctgttacccctgcggccggtttcgggcgcatattgccatcacggcagcctgacgcccgttttcaccttacttccggttacgccaccagccgacaatcgctgcggtaataattcccgccaggatcggtgccgccaggtcgtgccagaaagtcatggcaaactgcgcgagcgtcatatagccgccttgttgtaatgacaacattttgcggctattcttgaagtgtctggtttcaagattagcccccgttctgttgtcaggttttacctctcaacgtgcgggggttttctctttccagcaaccaatgccaccagggataaagcccccgcaacattgcgcctcaccggataattccggcttggtgtggatactacgtctcaattcatcttcacttcatccctgaaatgtttgcaataaagagtacattccggcttttcaacagctgttgcagtcgtttcatgagtgctctggatgatgcttccagctcgggttgccaatatttacttgtggaagagataaagacaaaaatggccgcaggctgttacccctgcggccggtttcgggcgcatattgccatcacggcagcctgacgcccgttttcaccttacttccggttacgccaccagctgacaatcgctgcggtaataatccccgccaggatcggtgctgccaggtcgtgccagaaagtcatggcaaactgcgcgagcgtcatatagccgccttgttgtaatgacaacattttgcggctattcttgaagtgtctggtttcaagattagcccctgttttgttgtcaggttttacctctcaacgtgcgggggttttctctttccagcaaccaatgccaccagggataaagcccccgcaacattgcgcctcaccggataattccggcttggtgtggatactacttctcaattcatcttcacttcatccctgaaatgtttgcaataaagagtacattccggcttttcaacagctgttgcagtggtttcgtgcaggttgtggtacaggctcgcaattctgattaacgagctgtccaggtagtatgaagaaatacaataagcaggaatttatcttatctcccccgatttccgtcatcggaggagatataactgtcaggcaaatatcgtcatcaaataggcggcaaacagtgccagatgcgctgcgccattgagcacgttagtacgtccggtggagaaggagatatggcacagcactaaagaggccaccatcaccaccatttctggcgcaccaagtgcaaactgtaattcgttacccgtcataaaggcaattagcgtgacgacaggtacggtaagcgaaatggttgctaacactgaaccaaagaacagattcatcgcgcgctggacctggttgttcaacactgcttttaacgcacctaaaccttccggcgacagaatcaacagagccaccaggaagccagtaaaggcgacaggggcattcatgctgtcgagcaatgtctccagcgggctggcattcattttggtgactgcaataacggcaatcagatggataatcaaccagatagcatgccacacgctgctatgggcagacggtttaccgtgatgcgggtcgtcgtcatcactgtcatcttcgtgctcgtagacaaacaaactttgatgcgttttggtctggatcagcaaaaatacgccatacattgccgcagaaattaatgctaccagtaacgcctgaccggttgaaaaattcgccgcaggcagagccattggaaataccagtacgattatcgccagggggaacagcgcaattaaatactgcttgataccaaacagattcatatattgggtggcaaacttacgaccgcccaacaataatgaaaagccaaccagcccaccggtaacaatcataatgattgaatagagcgtatcacgcattagcgttggcgcggcgtcgccggttgccattaaagctgaaatcaaactgacttcaagaataaccactgaaaggctaagaataagcgaaccgtaaggttctcccaggcgatgggctaatacgtccgcatgacggacaacactaaaggcgctacttaaaataccaataagcgcaagaagattgatggcaatgaccactggtagtgtctggctgcttccccacaggaacagcactaccagcgccagaaccgggaaaataagcgaagtctccttgtggcgggtttttaccgcctcttgagcatttgacattatggttatccctttgcagatgaatttatcgaaaatgtaaaaaataggtaggaaaaataacagaaagtgtctggatatcggtaacattttacgaatttttaccccactgtcgattttttactcattgggacataaaaataagtattacgtttagacaatgtttgttttagcgtttcttaagaacagtctgacatgaaaattcttatgttttggcaagagtagatattgttgaccacacttaatgttcaactttgtaaaaggagtcaacgatgccgtataaaacgaaaagcgatctgccggaaagcgtaaagcacgttctaccgtctcatgcccaggatatctataaagaagcgttcaacagcgcgtgggatcaatataaagataaagaggatcggcgtgatgacgccagtcgcgaagaaaccgcgcataaagtggcctgggctgctgtgaagcatgaatatgccaaaggggatgatgataaatggcataaaaaatcgtaaaaccggtagcttagttaaagctattcgtgcggtgttgccttgcaagtggtccgtggattgcatattgtcccgttagtggtttcaaaatgagcagtaaaaatgtccggaagacaccaaaaagttgtcgcagggaagtatgcagtggcggaggtgtaaggtgataacgcgtgatttcttgatgaatgccgattgtaaaacggcatttggtgccattgaagaatcactcttatggtcagcagagcaacgggcggcttcgctggcggcgacgctggcttgtcgacctgatgagggaccggtgtggatcttcggttatggatcgttgatgtggaatccggcactggagtttaccgagtcgtgcaccggtacactggttggatggcatcgcgcgttttgcctgcgcctgaccgccgggcgcgggactgcgcaccagccgggacggatgcttgcactgaaagagggcggacgcactacaggcgtcgcctatcgactgccagaagagacgctggagcaggaactaaccctgttgtggaagcgcgagatgattaccggctgttatctgccaacctggtgtcagcttgatcttgatgatggatgcacagtaaacgccattgtgtttattatggacccgcgacatccagaatatgaatctgacactcgcgctcaggtcatcgcgccgttgattgcggcggcgagcggtccgctgggaaccaacgcacaatacctgttttcactggaacaggagcttatcaaactgggaatgcaggacgatgggctgaatgatttgctggtatcggtaaaaaaactgctggcggagaattatccggatggtgtgttacggccgggattcgcctgagtaaacttccctcatagtggggcgtcagacgccccctcaaacattaaaatgtgagcactttatcggctgacagcgtccattgcgccagttccacaagagtaccgatttccaccccatcaataagaggaagtgtgctaatcccgcgcccgtcggtacaggttttgcacaatttcaccggtacattctgagcggtaaggatctccagcatttgctgaatgttgtagccttcccctggtttttgcccgcgcaacccggctgtgaccgcatcagacatgaggaacagacgcagatccagattgctctcctgctctcgtaacgcaatggccagccgcaagctgttaaacaaggattcgctcccgtaaggtgcgccattggcaacgatcacgattttttgcattatttactcctgtattcagggaattagacactcatcttctatcttactgcttctgcagcgtctgaccaatcggtcacatttttaaggattttcctgaaagcgcgagaaaatacgacaaaagttgccagtaatcgttattcttaaaggatatggtttttcattttttaccggaagttaccgacgttttgagccgtttcgttcctcgcattatttcgttttatttactcttgctggcggcaggcggtacagctaacgcacaatctaccttcgagcaaaaagcggcaaatccctttgataataacaatgatggtctgccggatttaggcatggcacctgaaaatcatgatggggaaaaacactttgctgaaattgtgaaagatttcggcgaaaccagtatgaatgataacgggctggatactggcgagcaggcaaaagctttcgcattgggaaaagtccgcgacgcgcttagtcaacaggttaatcagcacgtagagtcctggctatcaccgtggggaaatgccagtgttgatgtcaaagtggataacgaaggtcattttaccggcagtcgtggaagctggtttgtgccgttacaagataatgatcgttatctcacctggagccagcttggtcttactcagcaggatgatgggttggtgagcaatgtgggcgttgggcaacgctgggcgcgcggcaactggctggtgggttataacactttttatgacaacttgctggacgaaaatcttcagcgagcgggctttggtgccgaagcgtggggcgaatatttgcgactatcggcaaacttttatcagccatttgctgcatggcatgaacagacagccacgcaggaacaacggatggcgcgcgggtacgacctgacagcccggatgcgcatgccgttctatcaacacctcaataccagtgtcagcgtagaacagtattttggtgatcgtgttgatttgtttaactctggtacgggttatcacaatcccgtcgcgttgagtctgggattaaattacacccctgtgccattagtcactgtgacggcccagcataaacagggtgaaagtggcgagaatcaaaataacctcgggctgaatcttaattaccgctttggtgtaccgctcaaaaaacaactttctgcgggcgaggttgccgaaagtcagtcgttacgtggtagtcgctatgataatccgcagcgaaataatctaccgactcttgagtaccgacagcgaaaaacgttaacggtgtttctggcgacaccgccgtgggatctaaaacctggcgaaacagtgccgctgaaattacaaatccgcagtcgttacggtattcggcaactgatttggcagggcgatacgcagatattaagtttgacgccaggcgcacaagccaacagcgcggagggctggacgctgatcatgcctgactggcagaacggggaaggggcgagcaatcactggcgattgtcggtggtggtggaagataaccaggggcagcgtgtctcctccaatgagatcacgctaacgcttgtcgaaccgttcgacgcattgtcaaacgacgaactgcgctgggaaccgtaatcagaaaatgcgctcctgatgcacccataccgctgcttccacgcgagacttgagcttcattttcttcagcatgtgcttgacgtgcacttttactgtgctttcggtgatatccaggcggcgggcaatcatcttgttcggcaaaccctgggcaatcagcttgagaatatcgcgctcgcgtggggttaactggttaacatcgcgctcagtagtggcacggttagcgcgcaagctggcggccagaacaggcgttaatgcttcgcttaataccatttcgccagcagctgcctgatgcaatgctttcagcagatcttccggttccatatcttttaacagatagccatccgcgccgcgtttcagtgcggtgaccacatcttcttcatggttagagacgctgaataccacaatgcgccctgagagggacttttcgcgcagtttatccagcgtttccagaccgttcatgccgggcatattgagatctaacaggatcagatcgggatcaagagactccgccagttcaataccctgttcgccattactcgcttcgccaaccacggtgatatctggtgccatactgataagctgttttacgccagttcgcagcatcgggtgatcgtcaatcagcaggatagtagccggttcctgattactcatgggtatctccttggacgtctgtgaaagttttttcgggaataaaggtgaccaccacttcggtgccacctgattcacgacggcggacgcggcaatcgcctcgtaaactttgcgcacggtcgcgcattattatcatgccgtagtgattgctgcggatggcattttcaggcacgccgcagccgttatcctggacggtcagtttgacctgattatcgttttgcgccaccgtcaccacgacctcactcgcttgcgaatgtttgagggcgttacttaatgcctcacgggcaatttgcaacaagtggattgcctgatgtgaaggcaccagacgaggcggcaattgataatccagcttcaccgggaagccaaatttggcgctgtactcttcgcaactcgcttccagcgccggacgtaatccaggctcggtgagctgcaagcggaatgtggtgagcaattcacgcaactgcgcccaggatgcattcagttcgttacggatctgacttaacagttcgcggctgctttctggcagcgcatcgccctgcatctgtaaacaactcacctgcatcttcatgcaagagagagattgggcaatagaatcatgcagttcgcgcgcaatggtggcacgctcttccatcacgatcaactgttgctgacgttcctgatgccgatccagcgccagcgtggcggtgagttgttcaaccagggtatccaccagttgttgttgatcatggctaagatgacgcccctgcggtagggtcgccagcaaaataccgtactgcgtatgtgagtcagccagccgccacttcagggttgtgccgcgatcgccaacgggtaatacgccgcgcgggcagagctggcagcctttatcatcacaagtcatatctggctggcaggtaaactcctgatgattctcttcatcatcagtgtcatacacccgcaattcgatatcacgtagcagggttaaattctgtaagccgttgagtacaggtgacaggcgttcacacagcggggcgcgggaatgcaaacggcggttagcctgccataaaaaagagaggatctgatttttatgctccagcccggcggttttctcctgaacccgctgctcaagtacggcataactttcggccagttctgcagacatattgttcaatgcagttccaagcatcgccatttcgttgcgcccgctgatgttcgcgcgttgggtaaaatcgcgatgactgacggcactcgccattgccagcagttgccgccacggttgtagcagtcgcgcccgcaaccagataatagtgaacaccagtaaaagtgccataaataccgccattacccgatggaccagtaccactgtctcaatgcgcatttccgtggtgcggtcaaaaccagataccagctgatcaagcccggcaacaaactggctgacatccgctgacaccgtttcgcggttttgtgcacgcatcagtgcagggatcagttcattacgccagtaatcttgtaaaccctgtaattgcgccagttgtccgtctcgttctgctgctcgagtcaactcggcgctaaatgccgtttgttccatctctttaattaagggcttgtctttctcgcttaatggcactgctgccaacagacggtaactttgcatgcgcagcgatcccgctttgttgatcgcatgggcgctgccctgaacgccttgcaccagccagccagaaaccgccatccctgccagtccaatagcagtagaaagcaacacaataagcgcaacctgattaaccagggtgagcggagagagacaacgtttaagcatgtaaacctcttccttcaggctttaaatgagcaataaccttaatgaatgtgacgatacattctggaatggcagtattctcggctattggctgaagtatacccatacccggaaagagttactccttatttgccgtgtggttagtcgctttacatcggtaagggtagggattttacagcaccgtgaaaaatctcataatttttatgaaatcactgtactcactatgggtaatgataaatatcaatgatagataaagttatcttatcgtttgatttacatcaaattgcctttagctccagacactaaggtggcagacatcgaaacgagtatcagaggtgtctatgagtcactcatccgcccccgaaagggctactggagctgtcattacagattggcgaccggaagatcctgcgttctggcaacaacgcggtcaacgtattgccagccgcaacctgtggatttccgttccctgtctgctgctggcgttttgcgtatggatgttgttcagcgctgttgcggtgaacttaccgaaagtcggttttaattttacgaccgatcagctatttatgttgactgcgctgccttcggtttctggcgcgttattacgtgttccatactcctttatggttcctatcttcggtggtcgtcgctggacggcgttcagcaccggtattctgattattccttgcgtctggctgggttttgccgtgcaggatacctccacgccttatagcgtcttcatcatcatctctctgctatgcggctttgctggcgcgaacttcgcatccagtatggcaaacatcagcttcttctttccgaaacagaagcagggtggcgcgctgggtctgaatggtggtctgggaaacatgggcgtcagcgtcatgcagttggttgctccgctggtggtatcactgtcgattttcgcagtatttggtagccagggcgtcaaacagccggatgggactgagctgtatctggcgaatgcgtcctggatatgggtgccgttccttgccatcttcaccattgcggcgtggtttggcatgaacgatcttgctacctcgaaagcctccatcaaggagcagttgccggtactcaaacggggtcatctgtggattatgagcctgctgtatctggcaaccttcggctccttcatcggcttctccgcgggctttgcaatgctgtcaaaaacgcagttcccggatgttcagattctgcaatacgctttcttcgggccgtttattggtgcgctggcgcgttctgcaggtggtgcattatctgaccgtctgggcggaactcgtgtcacgctggtgaactttattctgatggcgattttcagcggcctgctgttcctgaccttaccgactgacgggcagggcggaagcttcatggcgttcttcgcggtcttcctggcgctgttcctgacagctgggctgggtagtggttccactttccagatgatttcagtgatcttccgtaaactgacaatggatcgcgtgaaagcagaagggggttctgacgaacgtgcgatgcgtgaagcggcaaccgacacggcggcggcgctgggtttcatctctgcgattggcgcgattggtggcttctttatcccgaaagcgtttggtagctcgctggcattaacgggttcgccagtcggcgcaatgaaggtatttttgattttctatatcgcctgcgtagtgattacctgggcggtatatggtcggcattctaaaaaataaaccgttactcgtcatacttcgggttacatgtgctgcggctgcgttcattcaccccagtcacttactttagtaagctcctgggattcattcacttgccgccttcctgtaaaccgaattatatagagtaaaatatttgattatcctttgcgcggcatgatgtcgcgctttttttatgcgttatttagttacaacatactaatgttatatggtttatttcgccggatttcattaagagccattaaaatgttacccatggggaatactccttaatacccatctgcataaaaatcttaatagtttaaataactacaggtataaaacgtcttaatttacagtatgttatgtggtggctgttaattatcctaaaggggtatcttaggaatttactttatttttcatccccatcactcttgatcgttatcaattcccacgctgtttcagagcgttaccttgcccttaaacattagcaatgtcgatttatcagagggccgacaggctcccacaggagaaaaccgatgagtaaattcctggaccggtttcgctacttcaaacagaagggtgaaacctttgccgatgggcatggccagcttctcaataccaaccgtgactgggaggatggatatcgccagcgttggcagcatgacaaaatcgtccgctctacccacggggtaaactgcaccggctcctgcagctggaaaatctacgtcaaaaacggtctggtcacctgggaaacccagcagactgactatccgcgtacccgtccggatctgccaaaccatgaacctcgcggctgcccgcgcggtgccagctactcctggtatctttacagtgccaaccgcctgaaatacccgatgatgcgcaaacacctgatgaaaatgtggcgtgaagcgaaggcgctgcatagcgatccggttgaggcatgggcttctatcattgaagacgccgataaagcgaaaagctttaagcaggcgcgtggacgcggtggatttgttcgttcttcctggcaggaggtgaacgaactgatcgccgcatctaacgtttacaccatcaaaaactacggcccggaccgtgttgctggtttctcgccaattccggcaatgtcgatggtttcttacgcatcgggtgcacgctatctctcgctgattggcggtacttgcttaagcttctacgactggtactgcgacctgcctcctgcgtctccgcaaacctggggcgagcaaactgacgtaccggaatctgctgactggtataactccagctacatcatcgcctggggttcaaacgtgccgcagacgcgtaccccggatgctcacttctttactgaagtgcgttacaaaggcaccaaaactgttgccgtcacaccagactacgctgaaatcgccaaactgtgcgatctgtggctggcaccgaaacagggcaccgatgcggcaatggcgctggcgatgggccacgtaatgctgcgtgaattccacctcgacaacccaagccagtatttcaccgactatgtgcgtcgctacaccgacatgccgatgctggtgatgctggaagaacgcgacggttactacgctgcaggtcgtatgttgcgcgctgctgatctggttgatgcgctgggccaggaaaacaatccggaatggaaaactgtcgcctttaataccaatggcgaaatggttgcgccgaacggttctattggcttccgctggggcgagaagggcaaatggaatcttgagcagcgcgacggcaaaactggcgaagaaaccgagctgcaactgagcctgctgggtagccaggatgagatcgctgaggtaggcttcccgtactttggtggcgacggcacggaacacttcaacaaagtggaactggaaaacgtgctgctgcacaaactgccggtgaaacgcctgcaactggctgatggcagcaccgccctggtgaccaccgtttatgatctgacgctggcaaactacggtctggaacgtggcctgaacgacgttaactgtgcaaccagctatgacgatgtgaaagcttataccccggcctgggccgagcagattaccggcgtttctcgcagccagattattcgcatcgcccgtgaatttgccgataacgctgataaaacgcacggtcgttcgatgattatcgtcggtgcggggctgaaccactggtatcacctcgatatgaactatcgtggtctgatcaacatgctgattttctgcggctgtgtcggtcagagcgggggcggctgggcgcactatgtaggtcaggaaaaactgcgtccgcaaaccggctggcagccgctggcgtttgcccttgactggcagcgtccggcgcgtcacatgaacagcacttcttatttctataaccactccagccagtggcgttatgaaaccgtcacggcggaagagttgctgtcaccgatggcggacaaatcccgctataccggacacttgatcgactttaacgtccgtgcggaacgcatgggctggctgccgtctgcaccgcagttaggcactaacccgctgactatcgctggcgaagcggaaaaagccgggatgaatccggtggactatacggtgaaatccctgaaagagggttccatccgttttgcggcagaacaaccagaaaacggtaaaaaccacccgcgcaacctgttcatctggcgttctaacctgctcggttcttccggtaaaggtcatgagtttatgctcaagtacctgctggggacggagcacggtatccagggtaaagatctggggcaacagggcggcgtgaagccggaagaagtggactggcaggacaatggtctggaaggcaagctggatctggtggttacgctggacttccgtctgtcgagcacctgtctctattccgacatcattttgccgacggcgacctggtacgaaaaagacgacatgaatacttcggatatgcatccgtttattcacccgctgtctgcggcggtcgatccggcctgggaagcgaaaagcgactgggaaatctacaaagccatcgcgaagaaattctccgaagtgtgcgtcggccatctgggtaaagaaaccgacatcgtcacgctgcctatccagcatgactctgccgctgaactggcgcagccgctggatgtgaaagactggaaaaaaggcgaatgcgacctgatcccaggcaaaactgcaccgcacattatggtcgtagagcgcgattatccggcaacttacgaacgctttacttctatcggcccgctgatggagaaaatcggtaacggcggtaaagggattgcctggaacacccagagcgagatggatctgctgcgtaagctcaactacaccaaagcggaaggtccggcgaaaggccagccgatgctgaacaccgcaattgatgcggcagagatgatcctgacactggcaccggaaaccaacggtcaggtagccgtgaaagcctgggctgccctgagcgaatttaccggtcgtgaccatacgcatctggcgctgaataaagaagacgagaagatccgcttccgcgatattcaggcacagccgcgcaaaattatctccagcccgacctggtctggtctggaagatgaacacgtttcttacaacgccggttacaccaacgttcacgagctgatcccatggcgtacgctctctggtcgtcagcaactgtatcaggatcaccagtggatgcgtgatttcggtgaaagcctgctggtttatcgtccgccgatcgacacccgttcggtgaaagaagtgataggccagaaatccaacggcaacccggaaaaagcgctcaacttcctgacgccgcaccagaagtggggtatccactccacctacagcgacaacctgctgatgctgactttaggtcgcggtggtccggtggtctggttgagtgaagccgatgccaaagatctgggtatcgccgataacgactggattgaagtattcaacagcaacggtgctctgactgcccgtgcggttgtcagccagcgtgttccggcagggatgaccatgatgtaccacgcgcaggaacgtatcgttaacctgcctggttcggaaattacccaacagcgtggtggtatccataactcggtcacccgtatcacgccgaaaccgacgcatatgatcggcggctatgcccatctggcatacggctttaactactacggcaccgtaggttctaaccgcgatgagtttgttgtagtgcgtaagatgaagaacattgactggttagatggcgaaggcaatgaccaggtacaggagagcgtaaaatgaaaattcgttcacaagtcggcatggtgctgaatctcgataagtgcatcggctgccacacctgttcagttacctgtaaaaacgtctggaccagccgtgaaggcgtggaatacgcgtggttcaacaacgtggaaaccaagccgggtcagggcttcccgactgactgggaaaaccaggaaaaatacaaaggcggctggatccgtaaaatcaatggcaaactgcagccgcgcatgggtaaccgcgccatgctgctgggtaaaatcttcgctaacccgcatctgccggggatcgacgattattacgagccgttcgattttgattatcagaacctgcataccgcgccggaaggcagcaaatcgcagccgattgcccgtccgcgttcgctgattaccggggaacggatggcgaaaatcgaaaaagggccgaactgggaagatgacctgggtggtgagtttgacaaactggcgaaagacaagaacttcgacaacatccagaaggcgatgtatagccagttcgaaaacacctttatgatgtatttgccgcgcctgtgcgaacactgcctgaacccggcatgtgtggcgacctgcccgagcggtgcgatttacaagcgtgaagaagatggcatcgtcctgatcgaccaggataaatgccgtggctggcgtatgtgcatcaccggatgcccgtacaaaaaaatctacttcaactggaagagcggtaagtctgagaagtgcatcttctgctatccgcgtattgaagcgggtcagccgaccgtgtgctcagaaacctgtgtcggtcgtatccgttatcttggcgtgctgctgtacgatgccgacgcgattgaacgtgcagccagcaccgagaacgagaaagatctttaccagcgtcagctggaggtgttcctcgatccgaacgatccgaaagtcatcgagcaggcgattaaagacggtattccgctgagcgttattgaagccgcacagcagtcgccggtttataaaatggcaatggaatggaaactggcgctgccgctgcatccagaatatcgcacactgccgatggtctggtacgtgccgcctctgtctccgattcagtctgcagcagacgcgggtgagctgggtagcaacggcattctgccagacgtcgaaagcttgcgtattccggtacagtatctggcgaatctgctgaccgccggtgataccaaaccggtactgcgcgcactgaaacgtatgctggcgatgcgtcattacaaacgtgctgaaaccgttgacggtaaagttgatacccgtgcgctggaagaggtcggtctgaccgaagcccaggcacaggagatgtaccgttatctggcgattgctaactacgaagatcgctttgtggtgccgagtagtcatcgtgaactggcacgggaagccttcccggagaaaaatggctgcggctttacctttggtgatggctgccacggttcagataccaaattcaatctgttcaacagccgtcgtatcgatgccatcgatgtgaccagcaaaacggagccgcatccatgatcgaactcgtgattgtatcgcgtctccttgaatatccggatgctgccttatggcagcatcaacaagagatgtttgaggcgattgctgcgtcgaaaaatctgtcgaaagaagatgcccatgcgctgggcattttcctgcgcgatttaacggcgatggatccgctcgatgcccaggcccagtacagcgaactgttcgaccgtggccgcgccacgtcactgttgctatttgaacatgttcacggtgaatcccgtgaccgcggccaggcgatggtggacctgctggcgcagtacgagcagcacggcttgcagttaaacagccgcgaattaccggaccatctgccgctgtatctggagtacctgtcgcagctgccgcaaagcgaagccgtggaaggtttgaaagatatcgcgccgattctggcattgctgagcgcgcgtctgcaacagcgtgaaagccgttatgccgtgatgtttgatctgctgctgaaattggccaataccgctatcgacagcgacaaagtggcggaaaaaattgccgacgaagcgcgcgatgatacgccgcaggcgctggatgctgtctgggaagaagagcaggttaaattctttgctgacaaaggctgcggtgattcagcaatcactgctcatcagcgtcgctttgccggtgccgtcgcgccgcaatatctgaatatcaccaccggaggacagcactaatgcaattcctgaatatgttcttctttgatatctacccgtacatagccggggcggtcttcctgattggtagctggctgcgttatgactacgggcagtacacctggcgcgcggcgtccagccagatgctggatcgcaaagggatgaacctggcgtcgaacctgttccatatcggtattctggggatttttgttggtcacttcttcggtatgctgacgccgcactggatgtatgaagcctggctgccgattgaagtgaaacagaaaatggcgatgtttgctggtggtgccagcggcgtgctgtgtctgattggcggcgtgctgttgctgaagcgtcgtctgttcagcccacgcgtgcgtgcaaccactaccggagcggatatcctgatcctgtcgctgctcgttatccagtgcgcgctgggcctgttgaccattccgttctccgctcagcatatggacggtagcgagatgatgaaactggttggctgggcgcagtcggtggtgaccttccacggtggcgcttctcaacacctcgatggtgtggcgtttatcttccgtctgcacctggtgctggggatgacgttattcctgctgttcccgttctcgcgtctggtacacatctggagcgtaccggtggagtatctgacacgtaagtaccagctggtgcgcgctcgtcactaagcgaattttagttcacatagaccctgcttcggcggggtttttttatgggcacggtgcggggtgagttgtcggatgcgcttcgcttatccgacctacaggggaggatattgtaggcccggtaaacgtggtgccatcgggcaaaattagctcggagtaacaggttttgattatttaaggaagcgatggtggtgggggaaggattactcagcgctgcgcgcttcgcccttcgggtcgttgcctgcggcaacgctctctcgctggcgctcaagtcgaaccttggtcgaagcttctcatccttccccgcttgggcagaatatttgattgcggattcgtttgagaattccggggcttttgaaagtgatggtggtgggggaaggattactcagcgctgcgcgcttcgcccttcgggtcgttgcctgcggcaacgctctctcgctggcgctcaagtcgaaccttggtcgaagcttctcatccttccccgcttgggcagaatatttaattgcggattcgtttgagagtttacggacttttgaaaagtgatggtggtgggggaaggattactcagcgctgcgcgcttcgcccttcgggtcgttgcctrcggcaacgctctctcgctggcgctcgagtcgaaccttggtcgaagcttctcatccttccccgcatgggcagaatatttaattgcggattcgttgggaagttcagggacttttgaaagtgatggtggtgggggaaggattcgaaccttcgaagtcgatgacggcagatttacagtctgctccctttggccgctcgggaaccccaccaggggtaattcaaatttcgaggtaatgcttgagatggtggtgggggaaggattattcgtcgcttcgctcctcacccttcgggccgttgcctgtggcaacgttctctcgctttcgctcgaatcgaaccttagtcgaaggttctcacccttccccgatgagtgcaaactttcacaatctcaccgaagttaccacatcgctgtggtgaattatggtggtgggggaaggattcgaaccttcgaagtcgatgacggcagatttacagtctgctccctttggccgctcgggaaccccaccacggggtaatgctttttactggcctgctcccttatcgggaagcggggcgcatcatatcaaatgacgcgccgctgtaaagtgttacgttgagaaaaatgaactggttgcgtaattttcatccgtaacggattaaaggtaaccagttatttttgctggcgattaaagaataatcgttcgattaccgtaaacaaagacgcgctgtgccagtactttgtatagtgcacgacttaagacgtttttctcgacgtcacgacctgcgcgcatcatatcttcagctgtgtaggtatgatcgacatgaataacgtcctgcatgatgattgggccttcgtccagattgtcattcacatagtgagcggttgcgccaataatcttcacaccacgttcataggcctggtgataaggacgtgcgccaataaacgctggcaggaatgaatggtgaatattgatgatcttattcgggaagcgtgccacaaattccggcgttaatacccgcatatacttcgccagcaccacgtagtcaggttgataagcatcaatggcatccgccatcttttgatcgtgctcgttgcgggttaacccttcatggcttaccagctcaaacggaatatcaaaacgctcaaccagagaacgtaaagtatcgtggttaccaataactgccgcgatttcgacatccaggccgccgtaattggctttcatcaacaaatcgccaaggcaatgcgcttctttagtgaccagaatcactatccggcgacgaccggcaggattcagctcacgcacggagccttctggcaatgcgctatcgagatccgccagcagggtggaatcattaaaaatcccttctagttccgtgcgcataaaaaagcgcccggtacggtgatcaacaaattcattgttctgtacgatatttaactcgtgcttgtagcaaatattggtaatacgtgcgatcagacctttttggtccggacaaatagtacgcagaactttacgttggagtgaatgcattgctggaaaaaccttgttgagagtgtttgctaaaccgtaccgtcaaccattattggccgcagcactttttaaattttttacctgaaccacaagggcagggatcgttgcgaccaaactgcggacgtgtaccgtcaatatagtaccattgaccgttttctttcaaaaatcgcgaacgttcaattattgcacctgttttaccaccttcggtaaatcgagcaacaaaactgacaaatccgatattgtcggcgtcctgccaacaatgttcaaatacggtcaatcccaaccattcagtatgcgcaaatccggccatcaattcggcacgtaacgccgctgctccacaagagggatgccaagtctttattaaataatctgcgtcttgcatcacaaaagcgcagtaacgcgaacgcatgagatgttctggatcaggtgcaaccttttcaccagacacataagggtggcaacataggctatactcgacagcactaccacagggacaaagctgagacacaaataatctccctggaaacaataacggcgtattaaccgcctgagtagcactatgttaaccgagcagtagcgatgtggctacgattgcattccaggggaatcttgcgggaataatgagaaagataaaaatagggctggcgctgggatctggcgcggcgagaggttggtcgcatattggcgttattaatgcgctaaaaaaagtgggtattgaaattgatatcgttgcaggatgttcaattggttcgctggtgggcgctgcctatgcatgcgatcgattatctgcgctggaagattgggtgacctctttcagttattgggatgttttacgcctgatggatctctcctggcagcgcggtgggttactgcgcggcgagcgtgtcttcaatcaataccgcgaaataatgccggaaacagagatcgaaaattgttcccgtcgctttgcggctgttgccaccaatttaagtacgggacgtgaattatggtttactgaaggcgatctccatcttgctattcgcgcatcatgcagtattccaggactcatggcacctgttgcacataacggctactggctggttgatggagcagtcgttaacccaattcctatttccctcacgcgtgcattgggggctgatattgtgatagcggttgacctgcagcacgatgctcatttgatgcaacaagatttgctctcctttaatgtcagtgaagaaaatagcgagaatggtgattctctgccgtggcatgcgcgtctgaaagaaaggttaggcagcataacgacacgtcgggcggtgacagcgccaacggcaacagagattatgaccacttctatccaggtgctggagaaccgccttaaaaggaaccgcatggcaggtgatccgcccgatattctgattcaacctgtttgcccgcaaatatctacgcttgatttccatcgcgcgcacgctgccattgcggccggacagctggcagtggaaaggaaaatggacgaacttttgccgttggtacgcaccaacatttgaccagaatttttatctacacttaagttaattctgacaggcgcaggtggcaatagcatgccactattgagtaaagccagtcaggggagagaacatgacgcagccattggtcggaaaacagattctcattgttgaagatgagcaggtatttcgctcgcttctggattcatggttttcctcattgggagcgacaacggtactggcggctgatggggtggatgcccttgagttgctgggaggtttcactccagacctgatgatatgtgatatcgcgatgccacgaatgaacgggcttaaactgctggagcatatacgtaacagaggcgaccagaccccagttctggtgatatctgccactgaaaatatggcagatattgccaaagcgttacgtctgggcgttgaagatgttttgctgaaaccagttaaagatctgaatcgcttgcgcgagatggtttttgcctgtctctatcccagcatgtttaattcgcgcgttgaggaagaggaaaggctttttcgcgactgggatgcaatggttgataaccctgccgcagcggcgaaattattacaggaactacaaccgccggttcagcaggtgatttcccattgccgggttaattatcgtcaattggttgccgcggacaaacccggcctggtgcttgatattgccgcactttcggaaaacgatctggcattttattgccttgatgtcacccgagctggacataatggcgtacttgctgccttgttattacgcgcattgtttaacggattattacaggaacagcttgcacaccaaaatcaacggttgccagagttgggcgcgttattgaagcaggtaaaccatttacttcgtcaggccaatctgccggggcagtttccgctattagttggctattatcatcgcgaactgaaaaatctcattctggtttctgcgggtctgaatgcgacgttaaataccggcgaacaccaggtgcaaatcagtaatggtgttccgttaggcactttaggtaacgcttatttgaatcaattgagccagcgatgcgatgcctggcaatgccaaatatggggaaccggtggtcgactgcgcttgatgttgtctgcagaatgagcaaacgataacgcgggctaaatttgcattacctgctaatgtcggctggtggtactatcgtcgccattcgtataagtaattgtcttaattatgctaactcgcctccttttcagaacttagccccttcggggtgctgatatactgggatgcgatacagaaatatgaacacgttcaaaacacgaacagtccaggagaatttaaatggctgccattaatacgaaagtcaaaaaagccgttatccccgttgcgggattaggaaccaggatgttgccggcgacgaaagccatcccgaaagagatgctgccacttgtcgataagccattaattcaatacgtcgtgaatgaatgtattgcggctggcattactgaaattgtgctggttacacactcatctaaaaactctattgaaaaccactttgataccagttttgaactggaagcaatgctggaaaaacgtgtaaaacgtcaactgcttgatgaagtgcagtctatttgtccaccgcacgtgactattatgcaagttcgtcagggtctggcgaaaggcctgggacacgcggtattgtgtgctcacccggtagtgggtgatgaaccggtagctgttattttgcctgatgttattctggatgaatatgaatccgatttgtcacaggataacctggcagagatgatccgccgctttgatgaaacgggtcatagccagatcatggttgaaccggttgctgatgtgaccgcatatggcgttgtggattgcaaaggcgttgaattagcgccgggtgaaagcgtaccgatggttggtgtggtagaaaaaccgaaagcggatgttgcgccgtctaatctcgctattgtgggtcgttacgtacttagcgcggatatttggccgttgctggcaaaaacccctccgggagctggtgatgaaattcagctcaccgacgcaattgatatgctgatcgaaaaagaaacggtggaagcctatcatatgaaagggaagagccatgactgcggtaataaattaggttacatgcaggccttcgttgaatacggtattcgtcataacacccttggcacggaatttaaagcctggcttgaagaagagatgggcattaagaagtaacatccgtatcggtgttatccacgaaacggcgttgagcaatcgacgccgtttttttatagcttattcttattaaattgtcttaaaccggacaataaaaaatcccgccgctggcgggattttaagcaagtgcaatctacaaaagattattgcttgatcaggaaatcgtcgagggatttaccttgctcatccattgcttttttgattacagctggagtacggccttggccagtccaggttttagtttcgccgttttcgtcaacgtagctatattttgccggacgctgagcacgtttagctttggtgccagatttaacggcagcaaggctattcagcagttcgttcgggtcaataccgtcagcgatcagcatttcgcgatattgctgcagtttacgagtgcgctcttcaacttcagcagcagccgcgctttcttcttcgcgacgttcgttaacaacaacttctaatttttccagcatttcttccagcgtttcaagtgtacattctcttgcctgcgcacgaagagtacggatgttgttcagaattttaagtgcttcgctcattgtagtaatctcaaacttatattggggtggtttgttgaggtaataatagagccttaaattcagttgtgcaatagccaggaatgtaaggaattcaaaattgttctttattttgtgccgccaataaatatcttttcataaaattagccagaaaagacgcggcatatagccctatttacaccgatgatttcgcagcacgtgaggttaaaacttcctgattcatgtcacattttatggggagattatcgtaggctgacgacctttcagtcttctgtattagttgtgtttacgagaattccctattaagcgaatgatgaaaagtagaacagtcgcaataagagcatggacttagtattgcactatctcctggaggtcaacagagggctattacttgcgcaacaggttaaagattgtgaatagttaccagcagtcatttacccgcttataacaagcgaggcagttgtaatgatagctcagaaggattatgcaaggcttcgtaagggagaacgcatatacccacttctgtgcatactgttgagctgaaaaactgacgaattatgataaactccagccaactttatttcatatcattgagggcctgtggctgatggcacagctatatttctactattccgcaatgaatgcgggtaagtctacagcattgttgcaatcttcatacaattaccaggaacgcggcatgcgcactgtcgtatatacggcagaaattgatgatcgctttggtgccgggaaagtcagttcgcgtataggtttgtcatcgcctgcaaaattatttaaccaaaattcatcattatttgatgagattcgtgcggaacatgaacagcaggcaattcattgcgtactggttgatgaatgccagtttttaaccagacaacaagtatatgaattatcggaggttgtcgatcaactcgatatacccgtactttgttatggtttacgtaccgattttcgaggtgaattatttattggcagccaatacttactggcatggtccgacaaactggttgaattaaaaaccatctgtttttgtggccgtaaagcaagcatggtgctgcgtcttgatcaagcaggcagaccttataacgaaggtgagcaggtggtaattggtggtaatgaacgatacgtttctgtatgccgtaaacactataaagaggcgttacaagtcgactcattaacggctattcaggaaaggcatcgccacgattaataagaatttctttactgacagggtgagcagggcacttttatcctgtcagttcgttttacgcacttcttccgggctatatacccttctcggcagttttttaacgccgctatacgcctcacagggctcttaagcaccgacgttgacttgtgacctgtaaagtacaatatccctgtgtttaggcgttatacatcgtcgcaaatatgatgaaggctaatgctgtcggtttatggaaaagttgctttgggtaaacaaaaaatacggccccagaagggcaatgccgttcacttaagaggagcggcactatgtttcacaggataacgggtttttgatatcttaaccgacctcggccttgatggtcgggggcgttttgttatgaacaccacttccagagcaccccgaagatgctccagtcgtttcgggatggtccctggtgacgccgtgtttcccagctctatcatttctgatgcgatattcttccacgcaggcagtagccagtggcggttacaacccttctggttcagcgtcagcagcaggtcttcgctgtaaaaaagtttatcaaacaacgtaatagagttatccgggatggtggcgagcatggagtgggccagcacagtttcgctctgccggtaaggtgcggtcacggcattcagcagaatgtgacttcccaggttcattaaggccaccagacgcataaccgggtaggcgttctgccgcttagtggatgtgttggcagacccataatattcacgcagctcgggtttatcaggtgtcctgaactgtgcgccatcaatggcaaaaagttgcaggccgtgccagtcatccttcaggtaacgttccgcgcccctgtctgtgcggtctggcggaagagccattccactggggcggcccccacgcgctgacgcgcctgggtgacagcgctgcgggccagcaggttcatccccgcttcgccatccgcgctcaggttcagacggcgaacaacatcggtaattggctcattgcaccaccatccagataaccatgtcccccggtaaacgacggcggcgaacggtcgcatgagcagaaagcgtcaggcagtgttgtatccactcggtgggaaggtgttctgcaaatagttgtgcagagggcggaggcataagcggatggtcactgaaatcgagcagatcattgagaagtggcataagaaaacggctccctgttgtggaagccgttatagtgcctcagtttaaggatcggtcaactaatccttaactgatcggcattgcccagaaggggccgtttatgttgccagacagcgctactgattaagcggattttttcgcttttttctcagctttagccggagcagcttctttcttcgctgcagtttcaccttctacataatcacgaccgtagtaggtatccagcagaatctgtttcagctcggagatcagcgggtaacgcgggttagcgccggtgcactggtcatcgaatgcatcttcagacagtttatccacgttcgccaggaagtctgcttcctgaacgccagcttcacggatagatttcggaatacccagttcagctttcagcgtttccagccatgccagcagtttctcgatcttagcagcagtacggtcgcccggtgcgctcagacccaagtggtcggcaatttcagcataacgacggcgagcctgcggacggtcatactggctgaatgcagtctgcttggtcgggttgtcgttcgcattgtagcgaataacgttacaaatcagcagggcgtttgccagaccgtgcggaatatggaactgggaacccagtttgtgcgccattgagtgacatacacccaggaaggcgttcgcaaacgcgatacccgcgatagtcgctgcactgtgaacacgttcacgcgctaccggatttttagacccttcgtggtaggacgctggcagatattctttcagcagtttcagtgcctgcagagcctgaccatcagagaactcagatgccagtacagaaacataagcttccatggcgtgagttactgcgtccagaccaccgaaagcacacagggacttcggcatgtccataaccaggttggcgtcgacaatcgccatatccggagtcagcgcatagtctgccagcggatatttctgaccagtagcgtcgtcagttacaaccgcaaacggagtgacttcagaacctgtaccagaagtggtggtgacagcgatcattttcgctttcacgcccattttcgggaacttgtagatacgtttacggatatccataaagcgcagcgccagctcttcgaagtgagtttccggatgttcgtacataacccacatgatcttcgcggcgtccatcggggaaccaccacccagcgcgataatcacgtctggtttgaaggagtttgccagttctgcacctttacgaacgatgctcagggtcgggtccgcttctacttcgaagaagacttcagtttcaacgcctgctgctttcagtacggaagtgatctgatcagcataaccattgttgaacaggaagcggtcagtcacgatgagcgcacgtttgtggccatcagtaatcacttcatccagcgcgattggcagggagccacggcggaagtagatagatttcggaagtttgtgccacaacatgttttcagctcgcttagcaacggttttcttgttgatcaggtgtttcggaccaacgttttcagagatggagttaccaccccaagaaccacaacccagagtcagggaaggtgcgagtttgaagttatacaggtcaccgataccaccctgagacgctggggtgttaatcaggatacgcgccgttttcattttctgaccgaagtaagaaacgcgagccggttggttatcctggtcagtgtacaggcaagaggtatgaccgataccgcccatagcaaccagtttctctgctttttctaccgcgtcttcgaaatctttagcgcggtacattgccagagtcggggacagtttttcatgtgcgaacggttcgctttcatcaacaacggtcacttcaccgatcagaatcttggtgttttctggtacagagaagcctgccagttcagcaattttataggctggctgaccaacgatagccgcgttcagcgcaccgtttttcaggataacatcctgaacagctttcagctctttaccctgcaacagatagccgccgtgggttgcaaaacgttcacgtacagcgtcataaacagagtcaacaacaacaacagactgttcagaagcacagattacgccgttgtcgaaggttttggacatcagtacagatgcaactgcacgtttgatatcagcagtttcatcgataacaactggagtgttgcccgcgcctacaccgatagctggtttaccggagctgtatgcggctttaaccatgcccggaccaccagtcgcgaggatcaggttgatgtctgggtggtgcatcagtgcgttagacagttcaacagaaggttgatcgatccagccgatcagatctttcggagcaccggcagcgatagcagcctgcagaacgatatcagccgctttgttggtggcatcttttgcacgcgggtgcggggagaagataatggcgttacgggtcttcagactgatcagcgatttgaagatagcagttgaagtcgggttagtggtcggaacgataccgcaaataataccgattggttcagcgatagtgatggtaccaaaagtgtcgtcttcagacagaacaccacaggttttttcatctttataggcgttgtagatatattcagaagcaaagtggtttttgatcactttatcttcgacgatacccatgccggattcggcaacggccattttcgcgagtgggattcgagcatctgcagcagccagagcggcggcgcggaagattttgtctacttgctcttgagtgaaactggcatattcacgctgggctttttttacacgctctacgagtgcgttaagttcagcgacattagtaacagccataatgctctcctgataatgttaaacttttttagtaaatcatctgctcgaatacgagagtatagtcagtgcggtgatgatttgcttaacctatgaaaatcaaaagcttactcgcgctcacactcactgtgatttactaaaagagtttaaacattagagttattatctctaatgcgtcacttccaggtggcgtaagcaagattactcacttctgggtactgattacgtgatccaaatcaaatttttgcaaagctgacacctttcagcatcgcttttcgccattatagataacagttaataaattgtagtatgatttggtggctacattagcatgttttgcacaactagataacaataacgaatgatagcaattttaagtagttaggaggtgaaaaatgctgtcaaaaggcgtattgtcagcgcgtcttttcaaccttatttatggctaacattatccggcttttgcttcggagctaaccgtgattcagaccttttttgattttcccgtttacttcaaatttttcatcgggttatttgcgctggtcaacccggtagggattattcccgtctttatcagcatgaccagttatcagacagcggcagcgcgaaacaaaactaaccttacagccaacctgtctgtggccattatcttgtggatctcgctttttctcggcgacacgattctacaactttttggtatatcaattgattcgttccgtatcgccgggggtatcctggtggtgacaatagcgatgtcgatgatcagcggcaagcttggcgaggataaacagaacaagcaagaaaaatcagaaaccgcggtacgtgaaagcattggtgtggtgccactggcgttgccgttgatggcggggccaggggcgatcagttctaccatcgtctggggtacgcgttatcacagcattaactatctgtttggtttctttgtggctattgcattgttcgctttatgttgttggggattgttccgcatggcaccgtggctggtacgggttttacgccagaccggcatcaacgtgattacgcgtattatggggctattgctgatggcattggggattgaatttatcgttactggtattaaggggattttccccggcctgcttaattaattcctttcaaatgaaacggagctgccatgctccgtttacttcgtcattatttttactttgttcccgcgcagttatcaaaagcaaaaggaataggtaaaaatattcttctcaaattacagttagttataaggatttccttaactgcttctcctcaccatcatgttattttcgccacatcataatcctgggcttgctgaagaataattgaaatgatattagtaattccactgcctttggtagaggaaagtgctaaataataatcaattgttaaattattgtgcatttcactactggaactgtaatcagaaaagatagacatgcttagccaatctctatttgattgaattgaaagatgtttgttaaggcatggatgcaagctatagattctgatacggtcaataaaagagaattgcttaacaattttgcaaaatgtattggcgagtaagaaccgcatttggtactttccgggcaaccgccagacgattctttattggtaatgagaataattaacaattaaagagcgtcgcgaaagaataatgtgtctcgacaggggagacacagtacgaatcgacataaggtgatcgtctgaatcaccagaataaataaagtcggtgatagtaatacgtaacgataaagtaacctgacagcagaaagtctccgagcctgtgcagggtcccaatccgggattacacatgctggttaataccagtaattataatgagggagtccaaaaaacaatgaccaacatcaccaagagaagtttagtagcagctggcgttctggctgcgctaatggcagggaatgtcgcgctggcagctgatgtacccgcaggcgtcacactggcggaaaaacaaacactggtacgtaacaatggttcagaagttcagtcattagatccgcacaaaattgaaggtgttccggagtctaatatcagccgagacctgtttgaaggcttactggtcagcgatcttgacggtcatccagcacctggcgtcgctgaatcctgggataataaagacgcgaaagtctggaccttccatttgcgtaaagatgcgaaatggtctgatggcacgccagtcacagcacaagactttgtgtatagctggcaacgttctgttgatccgaacactgcttctccgtatgccagttatctgcaatatgggcatatcgccggtattgatgaaattcttgaagggaaaaaaccgattaccgatctcggcgtgaaagctattgatgatcacacattagaagtcaccttaagtgaacccgttccgtacttctataaattacttgttcacccatcaacttcaccggtgccaaaagccgctatcgagaaattcggcgaaaaatggacccagcctggtaatatcgtcaccaacggtgcctataccttaaaagattgggtcgtaaacgaacgaatcgttcttgaacgcagcccgacctactggaacaacgcgaaaaccgttattaaccaggtaacctatttgcctattgcttctgaagttaccgatgtcaaccgctaccgtagtggtgaaatcgacatgacgtataacaacatgccgatcgaattgttccagaagctgaaaaaagagatcccggacgaagttcacgttgatccatacctgtgcacttactattacgaaattaacaaccagaaaccgccattcaacgatgtgcgtgtgcgtaccgcactgaaactaggtatggaccgcgatatcattgttaataaagtgaaagcgcagggcgacatgcccgcctatggttacactccaccgtatactgatggcgcaaaattgactcagccagaatggtttggctggagccaggaaaaacgtaacgaagaagcgaaaaaactgctggctgaagcgggttataccgcagacaaaccgttgaccatcaacctgctgtataacacctccgatctgcataaaaagctggcgattgctgcctcttcattgtggaagaaaaacattggtgtaaacgtcaaactggttaaccaggagtggaaaacgttcctcgacacccgtcaccagggtacttttgatgtggcccgtgcaggctggtgtgctgactacaacgaaccaacttccttcctgaacaccatgctttcgaacagctcgatgaataccgcgcattataagagcccggcctttgacagcattatggcggaaacgctgaaagtgactgacgaggcgcagcgcacagctctgtacactaaagcagaacaacagctggataaggattcggccattgttcctgtttattactacgtgaatgcgcgtctggtgaaaccgtgggttggtggctataccggcaaagatccgctggataatacctatacccggaatatgtacattgtgaagcactaatggcaatgcgtggggcaggagtgtcctgctccacggtgtctgatttttatcgcattacagaaggcacaggccagaaggtagggcaatgttaaaatttattctacgtcgctgtctggaagcgattccgacgctatttattcttattactatttcgttctttatgatgcgcctcgcgccgggaagcccttttaccggcgaacgtactttaccgccagaagtgatggccaatatcgaagcgaaatatcatcttaatgatccgatcatgacacagtatttcagctacctgaaacaactggcgcacggtgatttcggtccatcgtttaaatataaagattattcggtcaatgacctggttgcatccagttttcccgtttctgccaaattgggagccgcagcatttttccttgcggtaatactgggtgttagtgctggcgttattgccgcattaaaacaaaacaccaaatgggactataccgtgatggggctggcaatgaccggggttgttatccccagttttgtggttgcaccattattagtcatgatatttgcgatcattttgcattggctgccgggcggtggctggaatggtggggcgcttaaattcatgatattgccgatggtggcgttgtcactcgcttatatcgccagtattgcgcgtattacccgtggctctatgattgaagtattacactccaactttattcgtactgcccgggcgaaagggttacctatgcggcggatcattttacgccacgcattaaaacctgctctgttacccgtgctctcctatatgggccccgcatttgtcggcattattaccggttctatggtcatcgaaaccatttatggtttgccggggattgggcaactgttcgttaatggcgcattgaaccgtgactattccttagtgttaagcctgaccatcctggttggtgcgttaaccattttgtttaatgccattgtcgatgtgctatatgcggttatcgacccgaaaatccgttactgatactggagctcgcgatgatgttaagtaagaaaaacagcgagacgctggaaaatttcagtgaaaagctggaggtcgaagggcgcagcttgtggcaggatgcacgtcgacgttttatgcataaccgtgcggcggttgccagtctgatagtgctggtgctgatcgcgttatttgtaatcctggcaccgatgctttcgcagtttgcctatgacgatactgactgggcgatgatgtccagcgccccggatatggagtccggtcactactttggtactgactcatccggtcgcgacctgcttgtgcgcgttgcgattggcgggcgtatctcactcatggtcggtgttgctgcggcactggtggcagtggtcgtggggacactttatggttcgctttccggttatctgggcggtaaagtggattcggtaatgatgcgtctgctggaaatcctcaactccttcccattcatgttcttcgtcattttgcttgtgacctttttcggtcaaaacatcctgctgattttcgtggcgattggcatggtttcctggctggatatggctcgtattgtgcgtggacaaaccctgagtctgaagcgcaaagagtttattgaggcggcacaagttggcggtgtatcgacatcgggcattgttattcgccacattgtgccgaatgtactcggtgtggtggtggtctacgcatcacttctggtgcccagcatgatcctctttgaatctttccttagcttcctggggttgggtacgcaagagccgttaagcagctggggtgcattgctgagtgatggcgcgaactcgatggaagtctctccatggttattgttgttcccagcgggattcctcgtggtgacgctgttttgtttcaactttatcggcgatggcttgcgtgatgccctcgacccgaaagatcgttaaggagtgcagccatgagcgtaattgaaactgcaactgtgccgctcgcacaacaacaggctgacgcactgctgaacgtgaaagatttgcgtgtcacctttagtaccccggacggcgacgtcacggcggtcaatgatttgaatttttccctacgtgccggagaaacgctgggtattgtaggtgagtctggttcgggtaaatcgcaaactgcatttgcgttgatgggcctgttggctgccaacggacgtattggcggatcggcaaccttcaatgggcgtgaaatcctcaatttgccagagcatgaactcaataaactgcgcgctgaacaaatctcaatgatttttcaggacccaatgacttcgttgaatccctatatgcgcgtcggtgagcagttgatggaagtgctgatgctgcataagaacatgagcaaagctgaggcgtttgaagagtcggtgcggatgctcgatgcggtaaaaatgccggaagcgcgtaaacgcatgaaaatgtacccgcacgaattttctggcggcatgcgtcagcgagtcatgattgcgatggccttgttatgtcgacctaagctgctgattgcggatgaaccaacaactgcgctggacgtcaccgtacaggcgcagatcatgacgctattaaatgaactgaagcgggaatttaataccgccatcattatgatcacccacgatcttggcgtggtggcggggatctgcgacaaagtgctggtaatgtacgccgggcgcacgatggaatatggcaacgcgcgcgatgtcttttatcaacccgttcatccttattctatcggtttgctcaacgcggtgccgcgtctcgatgcggaaggtgaaacaatgttgaccatcccgggtaatccgccaaacctgctgcgattaccgaaaggttgcccgttccagccacgttgtccgcatgcgatggaaatttgtagtagcgcaccgccgctggaagagtttacgcctggccgtctgcgtgcttgctttaaaccggtggaggaactgttatgaatgctgtaactgaaggaagaaaagtcctccttgaaatcgccgatcttaaagtgcactttgaaatcaaagatggcaaacagtggttctggcaaccgccgaaaacgctcaaagccgtcgatggtgtcactcttcgcctgtatgaaggggaaacattaggtgtggtaggggaatcgggatgcggtaagtccacctttgctcgcgccatcatcggtttggtcaaggcgaccgacggtcatgttgcctggttaggtaaagagttgctgggcatgaaacccgatgaatggcgtgccgttcgcagtgatattcagatgattttccaggatccgttggcatcgctaaacccgcgtatgaccatcggcgagatcatcgctgaaccactgcgtacttatcatccgaaaatgtcacgccaggaagttcgcgagcgcgtgaaggcgatgatgctgaaagtcgggttattgcctaacctgattaaccgctatccgcatgagttctctggtgggcagtgccagcgtatcgggattgcgcgtgctcttattcttgaaccgaagctgattatctgtgatgagccggtgtcggcgctggacgtgtcaattcaggcacaggcggtcaacctgctccagcaattgcaacgtgagatgggattgtcattaatttttatcgctcatgacctggccgtggtaaaacacatttccgatcgtgtgttggtgatgtatctcggccatgcggtagaactggggacctatgatgaggtctaccacaatccactacatccttacaccagggcattgatgtcggcagtccccatacctgatccggatctggagaagaacaaaaccatccagttactggaaggggaattaccgtcgccgatcaacccgccttccggttgtgttttccgtacccgttgcccgattgccggtccagagtgcgccaaaacacgtcctgttctggaggggagtttcagacacgccgtttcttgcctgaaagtcgatccgctttaaaaacaataagggctgacagttgtcagccctttttcacgctaaaagcgattatttattcccgccagatgatatggcaaagtttgtgatctttttcgcggcataacagaatgcgggcaaaaacatcgttgatttcaccatcttcactgtccgccagaccaatcaccacttcggcaaaaaagtccgggttcaaatcgaaatcaacatgttcctgccagtcttccgccggatcgaataactccgcgccgccgcgctcttcaaactgaagattgaacagcagaacatcagctggatcgagattgtcggcagccagttcgagaaaaatatcgtaggcctgttcaagcgtttcatcttcagtcaggcgattgtttagatccatatccatagttactacctgtttaacctctgttggcgacgttttacagcaacggactgaagaagtaaaacagtcgctcggcgacacgttgccataatggacgttttagccataaacgggcatcgagcagacgtgaacgcgaaatataatcgtcctgaacggcggcgaggtcagcaccaaaacctttatcgtcgattgccagggtaatctcgaaatttagccacagactacgcatatcaaggttaactgtgccaaccagacttagttcgccatcgaccagcacgctcttggtatgcagtaacccgccttcaaactgataaattttaaccccagcagccagcagttccgtaaagaatgcgcgactggcccagccgaccagcatcgagtcattttttcgcggaaggataatactgacatccaccccgcgctgcgccgccgtgcaaatcgcatgaagtaaatcatcgcttggcacaaagtagggcgtggtcatgatcaaatattcacgcgccgaataagccgcagtcaataatgcctggtgaatgagatcttccggaaagccggggccagaagcaattgtgtgaatggtgtgaccgctggcctgttcaaacggcataatattgacatctggtggtggcggcagaatacgttttccggtttcaatctcccagtcgcaggaataaataatccccatcgcggtggcgatagggccttccatacgcgccatcagatcaatccattgccctacgcccgcatcttgtttgaagtagcgaggatcgaccatattcatgctgccggtgtacgcgatgtaattatcgatcatgatcatcttgcgatgttggcgcaggtccatacggcgtaaaaacacacgcatcagattgacctttaaggcttcgaccacttcaataccggcattacgcattagctcgggccacgggctgcggaaaaaagccacactcccggcggagtcgagcatcaatcggcaatgaatgccgcgtcgcgcagccgccattaatgattcagccacctggtccgccatgccgccgggctgccagatataaaacaccatctcaatattatggcgcgcgagctggatgtcgcggattaacgcctgcatcacatcatctgactcggtcatcagttgtagctgattccctttgaccccagcgatcccctgacgacgctcgcaaagcttgaatagtggcgcagcgacactgctattttcttcggcgaagatatgcttacaggctttaaggtcgttaagccattttgcggtggaaggccacatcgctctggcgcgctcagcgcggcgtttgcctaaatggagctcgccaacggcaagataggcaataattccgactaacggcagaatgtaaataatcaacagccaggccatcgcggagggaactgcgcgtcgtttcattagaatgcgtaaagttacgcctgcaatgagcaaccagtatcccagaatggccaaccaactcaccaacgtataaacggttgtcatagattagaaatccttttgaaagcgcattgttatgagtttacgcatatggattcatctggcaaataaaaacgcgggaaaagcactggtcagcgtcgggggtgggggtataatgaccattctgttattgcatagagtagttaacatgaagcggagtagaacggaagtggggcgctggcgcatgcagcgtcaggctagccgacgtaaatcgcgttggcttgaggggcaatcgcgccgaaatatgcgtatccacagcatcaggaagtgcattctaaacaaacagcgtaactcgttattgtttgcgatctacaatatctaaatgtactgggcaccattgcggtgcccaataagtttactcttccgtctttaaactctatttttgcgccgattctttactgtcagctttcgtttctagttcatcgttatcgctgaaaataccatgacctgagttcaacaacattgaaacgagcatatcattattaatctcttcaccatttaaaactcgcgccagaatttcgctgccaaacagttgcggtgagagaatgatatccggatgtaccatcttaatcttattcaggtttttgctatcactgacggcgagaactgttttgacatcactgctcatatcttttgccgagagtacaacaaacgcgttatctgcatcgttatcactcagcgccagaatggcccggcaacgatcgattcccgctttctttaatacagaactgtcattactgtcaccggggataacatcagcattatcgcctaagcgttgctcaagttgcttgatatcatcttcaggcaagttgctgataaccgttacgttttgtccgcgttgattcagttgcaggatcgtattgatggcgagaatcgaatgtccgcaaacaataaaatgatctttacgatgcattgtatgattgtttccttttacaagtttgttgaatcccccgcggataagcggaccaaaaattgaggtcatagatgtggcaaaaacggtaatgccggaaataatgaccgaaatagtgaacaatcgtgctgattcagaaacagggacaatatcgccatagccgacggttgacatggtttctatcgaaaaatagaacgcggtcatcaaactttctattcgcggattaaaaccttcgcttaaataaagcgcaccgtaggttgagtaaaacagtaatgtcgtgaaactaataaatgcaaaaattgtcccggctgcggcgctactgtgggagaagtctttgcgcagtatcagcaaaaacaccagcgtaaaaatgcaaaatccaatactaaatttcagccagggataaaaatgcagggtgtaaattagcgctatcaacaacaaaatgatactgattgcccatgcgagctttgcccggaacagtaagccaatggagttcaggacaagaaagacgccgagcataaagagtggggcgtttgccagcaaggagagatccaactctgaaaatgctttgatatggaaaatatcaagcaaattgaccgacataccatagattgttttaaaaataagcaatccatttaaaaagacggccagcgcgagaatgtcgtgccgaagggtcacccataaatttgttgctgtttgtttgaatgtagcccagtgactcactgatacctctgtaaccacaattttgtttaattatcttagcgtgcacattttctgaacatacatgcagcgcgtgaatgtgttaaacaatagtagatgactttatccgcagtaatcaaaggatttgagcgagcaactgtacctcaggaaaggtcatttttcctgaatatgctcacatcatataaagaaatacagataaagttattatctgcttgtggtggtgaatgcactgaccggctataaggaaaggccaaacaagaacacggttgcaaaaaccgtgcccttaaatattgaatctctattcagaacactttcttaaatggtttcactgaaacgtgttcatagactcctgccgctacgtacgggtcagcatcggcccaggcctgagctgcttccagcgattcaaattcagcaataacggttgagccagtaaatcccgcagcccctggatcgttactgtctaccgctggcattggaccagctgtcaacaaacgaccttcatcatgcagtaactgtaaacgtgctaaatgtgccggacgaacggaaaggcgtttttcgaggctatcagctttgtcttgagcgtaaataacatacaacacgggcacaactccttgttcgggaaagttgtaaagtacgttatttgaaagggcgaagatctgcaacggaaagatgatgtctttgttaaggccatgcataaagtaagggtaattacgccaaaaatgacattttcactgatcctgatcgtcttgccttattgaatatgattgctatttgcatttaaaatcgagacctggtttttctactgaaatgattatgacttcaatgacccttgaatgaagtctattcggttttctaagagacctgttaattacaggacaatatcaggttagtacctatgcaatttaacggtatttcttcaaatatctaagcaattctacacagattctatacagtatcgacatagcccctttttagcataacttattgaaatatataaagaatctgtgaagtctcttttcagggtaaactgtatcgtgttagtcgtccctctccagacactacatatagtgctatatacagggctatataacgatatatagatgtttggtcaccatacgttacagttgcaagagataacaatcagctatgtgaaagttaggaagtgatggttatagttaccctcctaaaatcttcatagctccttcataaccagtcttaaaaggacttccttttgagacactttcaacgtaacggtagaatgcaccctcaaggagtcttaaaaggttgtttttggattatgagacagctaaacttatgagactaacttttgagacttctaagggggatgtatggcggtgattggttattgcagggtatcaacacaagaccagactgtagacaaccagaaactacagatagagaaggttcacaaggtcgataaatggtttattgatgaggctgtctcaggagctacaaaggccaccagcagagatggttttagagacatgatgaactatgtaaggtgtgacgatacgttagttgtggtagctattgaccgtttagggcgtaataccgttgatgtgctctctaacgttgagtcactacagactaaaggtgtgagagttgtttctttacgtgaaggttttgacctgtctacaccaatcggtaaagcaatgcttactatgatggctggtttagctgaccttgaaaaagaccttatcagtgagcgtagaaaagctggtattgaacgtgctaaagctgaaggggttcacatgggaagacccgtaaaagcttcttcagagactgtaaagacgcttatttcacaaggtaaaacgaggttgcagattcaggaagagctaggaatctctagagcaacttattacagacttgctaaataagttactgaatagttacatggatgtgactgatatttggcttttttgcaaagggggtcacatagctggtgtgacgggtacttagcagctacagattgattgcagatattttcgaagattatcggggaagggaaatgtagaggggctagtcattttttataaaaaatttagaggctggatattacctgtatagattttaaccagtatagaagcctgtataacatgaggggttcctatggtcactatatccctctttcccactaaggaagccttagcagcacctaggcaactattgactaaggtcaacttcataaactcagagttaagttaccttgaaagattctaccaagaaactacacaggtattatttagtctgactgtgaagagatgtttaacgggaggaagagaaccatgaaaccgaaggtaggttctatcttaacagtgaccgtaagaagagaacttgagagacaactaaacaaacctcttaagtaaaagacaacactccagaaagagtgtctgtttaacaggcttctcaaaagctcttaagaaatctgttaagtagggttatgtgaacaatcttaccattttgtcaagtgttttgtctttagcaaaaagtgctaaacttaataaaaagcactaaatgctaaagagacgattaagaaataaactaagaggggcgcttcgcttgtgtcacatccaataatcaatgtcggtcgttatcatggtggttctgatgactggcgtacaccgtatcgtttatttcgtaacctacaccgtgaatttggtttttcgatggatggtgctgcaactgagcatgacgcattgttgccacggttcaccgatgatataaaccgtcaatcatgggttggtgaacgggtcttcgttaacccgccgtttagcatggctgagcagttcctcctaaaagcccctgaagctgatgtgtgtgtatgtctggttccgcacaggtcaaagacaacttactggcttcggtgtgtatatacaaacccctttctgcatgagattcgaacgttacaccgagcagtcaaataccttccaccagcagggaagaaaggtgttgcagcgcgttcaccgtttccaagttgcgttttgatatacaggaacacaccccgcaaaccgaaagttgaagttacccagacaatttattgtggcgacacaatgcttttacttgccgtggttaatagaggtggtttacgtggaagacctcatatgcacgatgcacagacgctcgacagcttcataaaactatacaggcaaggaaaacccattaagtgcattgcagatgctctcagaatgcctctgagcacgtcatacaggattgctcaaaggttgagctaaaattctcataaatatggtcatttacaagacaggtgatttagatattaagaagtatccctgtgaacaataaatgaccaatcagtaatcattctgtgaaataattgttgcaatttataatcacatctgttatagtttctatatgggctgataaaaaagttcatgtcttgaagtggtgacacttggggaggtgtcagatgattgatgtcaacaagacctctcattcagggtaattacctcagcgttttaatcatcgtactgtttcaggcatgggcttctttatcagtccatcaatcccccagatattttaatcacacaggctaatcggttttatccggttggccttttcacgtatgaggtaatttatgaatgtctaaatataacccaaatcagttttataaatttgatgtgcgaatctctcagctttcagaagaaattaacgcagcagcaagattaatttatatggtcatggttcatagctgtgatttctatgaagagaagtacaaagcatattcaccaagtattgaccatctagcttatatggctggtgtttcaaagagaacggcaatcagagctattgagacacttgagaaacacggtttaattcaggtgcaaaagaatcagggtcgtcaaagcacttatcgtgtattcacactggatgataagccggaattacttgtaagacctacatcacaggaagttgcagcctcagtaagacaaaatgacaccactaccagtgacaaaatgacaccactaccagtgacaaaatgtcatgggggtagtgacaaaatgtcacccgtgttagataagttattagataaaacattagataataatattatagataagagtaaagagactggacttaatgatggcattaatgaagatgattttctttctttggatgaattaaatgattttctctctatgaatgaatctgaccttgatagtgaagctactaaagagacctctaaaacatctgacttagaggaagataaaatctctgatgtgaatatcgatagtgaccataaaaacacacagtgccccgccattgatgatgagatggaccccttcgatgattaccttgatgaagagtcagagcgtgaagaggctattaaaaaagcacaacgcaaagcagagattaaatcacgcattgaaatggcgaagctaaagaacaaggttaatgacctcgatgactttgatgatggtgacgatgatgacttttctttcacaccaaagaagaaagtagttagtgaaaataagaagcaaaggattaagcctaaaatgtactatgcaggtggaggtatccaatgagagaatataacggtgaaaaacgatacaaagattatctattaaggcgctacagcatttctcgtgaaggtcatcttctgaaagacactcatggggaggtttaccggattcgaccgaagaaagaaggaaagaattatttcttttttgatggtgtgacagatttaaagattgacgctttgaggtttgcagtgatgtatcattttgatgtctgggactcaatccaccagctacgactaagagatggtgaccccagcaacttaaaggccaccaatatcatcacaaaacgttagtttgttttaccatcatcaatcgtaattgtgatttcatatttgaaaagcttaatgctgaaattgaatcgtgtacttttggcgataatcatttttaaaagctgatacaccagaagcaccagaaacacaaagcaacctaagcttgcgaatctgtgagattcagcaattgtttcaagaaagcccattaattccccttatttatcaaagggaatgacctgtatcagcccctacaaccataataccatgtaaatgagatgttgacaatatgttaaataaatgttaagattgtagtatgagtaagagatttaaggagatttttacaatgactcacacagttacgcgccttttgccagaggcatttgaacgactggcagcaatcaaagccaaataccctgatatgaagcatacggcgcttgttggagagcttctaaaagagccggtaaaccttagccctttcgataacgttaagggtgttgcagaaggttctaaggccatcagaatcacaacgaaccaactggaactactcaaagcacagtccgcagtagcaggttgctcaatgattcaagtgttaagtaccaaggttcatcaactggcggataaattgggggtttaatgctatgcacatttgattatcatgcgttttatcgccatagaggtcaccttgtccgtgagaataacggaacatggaaagatttaactcgtaatgctgaacccttcacacaccagcaattaaaatcccgcttctccagatggaagaatgcaccagcagatactggtgattttgagattatccataccttcgattatgcctcagaagatgaccttcacgatgcaattaagctgattgaagacttcaatacctcagaagatgtggatggtgacaaatataaatcccgtggtaaccgctataaccgtgatgatatcactcaggccataaatgctggtcaatctcagcgatacatcacagaaaaatatggtatttcacggagacagtatttctacgtaaagtcattgattaataaagacaattcaaaataaccatctaagtaacggtagaatgcactttacaggcagagttgcaccttaatttgataaattaccttaacagccagtgcaactccctctgtaacccgcatggttactggcctcagaatggctattttaagaggtctgagatgtgttttatgggaaatctaaaaatgaacaattacccaatgcaaattatggttgaccaagaaactatgaattggttgattgacctgaacaggttaggatttaacgtgcatttcatgcattgctttgaagcttcaagttatatcgacaaacgcaccatcaacgaaattaaacttggtgactatgttcacaagctggaagtaacagacccatacaataagcgctttatcattgaagagtgcaatcgacttgatttaagccctgagcaattattgaagctgaatgtattcttgacctttcagaatgaattaaacccttacagtgaggtgatgtaatgacgttaattgtattatggacgctgctagggctatttgttggctgcattattaacaatgcggtaaataagaattgatgttaccaatctgttaaaaagctgttgacaaataaccttgagcatgacataattgtatatatgggagagcaattctctcttatttctttcaacaattccatctacatctagggatagttattctgaaaggtgcaatgcttttcgtcatggcttatttagcccacactaaataggccatatcaaaaatctttgttcattcattgaatcctttacagctttgccctgactcatgattagggcgtttctttaagagtttttaaacagagcttttaaagaaagttttcctgaaacttcgttaacgttataagcaaacctccaaagcccttcacagataaggatgattccatgaatatccgaatcacctatgtttagggcttttcagtttttaaaagcacacttggcaggttcttgttcagtcagactcttcacctctgattgctgagtgtgcttctataaattgaaaaacaaacaaaaaccaaagaggtgaaaaaaataatgtctattcgtaatgaacacgaaatgattgttgagaacagaccaagtgcacttgatattcacgaattaagtttgcgtgaatcttttgatagagcttggcgggaatcacacgaagtaaataaaggtccatatattccaccagaaccactcgagattccaagagttgaaattgatttttctatgaacgaacggtgtgaacttgatttgaagttgaagctacaacgccgatatttccaagctattaaagactctcaagaagcaatgagaagtgtttacgagaaaattcagtccaagcttgaagacgaaattgacgaaatggctattttgatggagcttcaaaccaatccttatgcttatttctctcgactagaccgtgacggttgggggtatgaccctgtagagattggtaaagtgattgcagatttaccagaaggtcaaagagttgttcgtacagaaagagccattagagcgccacatcgactgtctctaattgttgctgataaatcacaagctgagcttgaagaaattgccaaagagaaactgatgaaagcaagagaaaatgagattaatttgctgaaatcaagactggctaagctgattagtgaccatcaagcgctggctaaggagtaccgtcaagagttggcacagattatcagcttcaatgattttctgagtgttccacgagaatttagcaaggctgtttgattatgcaatatgtgaggtgattaatgtttgaagaacgtttagagactattcggtctgtttgcgaaagactccagctacaaccaaatagacaaaagctacgaattaagaataaccgtcattacatcacctcacacaaaccaaaaacacgcaagattccaaagtggtgtattgaccgtattccttctgatgctcaaattataggtgaaacggaactacattatcttgtccgacattaaaaaagaattggttgggtaaatacggggagagattaaccttaattggttggtcctccccttttttgtatgaggtgaatatgaataatggcacagtttaaagttgatgacttcctgattgagttaagttttaactctcagaaagttttaaaaggcttggaaaaagccgagaaacaaacgatgcaaatcgcatcaagaattgaaaaacgactaaataaagcattcagagttaatcctacgcctttaaatgattctctcaaggtcatggaaagaaatgtcgataaaactgtttccaagattgagcagcgtcttaaaaacactaaagcgtttaagattaaaacggaaattgaggatactttaaagccacttagacaaccgagacagccacgaattagcggaaacagagcaatcacagcagcgcatagcgtgaatatgagcaagcttcgtgactttaatcctatgcttgagaagtattttaagagtcagtattacagcctaagcagtaaatccaagacacttggaaacgaagcttttaatcgtgagttagcaaaattaaatcagtctcttcgtgaaacactttctaagtttaacaagaccaccagcaaaaataatcacagtgaaaatgcttcaaatggtttagatgtactagcttcaagtgcaattaaagcgggtacagccatttatagttttcagacagccttagaagcttacaagaaggttatggagattggcctgaaaaaagaagcatcacaacgagcggcacaattcgttttaggtgatgaaggcgctaaacgagctacagaatttgttaagaatcttgctgatagtagtggtgtagaccagattgaaacattaagcagttttgctaagttttccgctggtgctggtgatatggatgcaggccagaaagaatccttattttctaatgtgattggtacatcccgactaatgggtttaagcactgatgagattaacgggattctaaaagctttcgagcagatggcttctaaaggaaagattcaagctgaagaacttcgtggacagctaggtgacagaatggcaggtgctttccagttatttgccagaagtcttgggatgactacggaagaattagacaaggccatgaaagacggtaaagttctttctaaagatgttcttcctaaagtatccgctgaaatgggaaggatgattgataaagctggtggatgggaaaagattattaactctactcagacgcagttaggccgcttaagtaattcatggaataataatttggccttaatgttcgatggttcacaggaaggtttaacagactttacaaggtcactgactaatttacttaattcactaggtggtcaatctaaaaatcttggtgaacattttggcgacttgatgaaaagcatgtcaaacggtattgatgatttaaccacgattagctaccgagtgcagggattctttgacagagtgacccttgcttacagagatttaaatgacactcaaaaagctgtagctgatggtatcgcaaatggcctgttaagtgcattaaagggacttgctggtattgtcgctgtaaggtctggtattggtgctgtaggtggtatctggaacttaattagggctatttccatgcttggaaatgtagcaaatacagcagcgggaagaattaattcacgttccggtggtgttgaaggtggtaaaggaaaattatctgtagctgatgcaattaccaaagtaatgattgtcggtatggcaactgatgtgattaactccattgttaaaccgttctatgaacgtcagatgagtaagtcagataatccaattgacaaagttgtaaggtcaaaggtggaacctacagaccaagcattgtctggtgacatgaactctttagccgctgttttatgggctatggttcagggcaaatcaaaagatgttccacagctttcacctgaagcattaaatagtctgaaaggtcgagtggaaacattcacacaagatttaaaggttatcaagccgtcagtaaatattcagcctcagacaatcaatatcacaactcagacggtacttgatggaaaggttattgatgaaagaaccacatcgcatattaatcgtatgcaggaagataccttgattagctcagcttacccagaggaataaacaatgttagaactactaatatttattgccacgcatggcaatctattaatctttatctagtatgacgattcaactatgaatagtcgaatgctacgtgatttcttctgaacagataccaacatcaaaaattagatttcacgtagctcacgcttaacagaataggaataacaacaatgtttgacacaaagcaaattagatactcaggtaaagatggtatctattttcaccttagagacaatgtagaatcttttcttgccttaacagctactgaacagatggactatgactcaccgatgatggtgacaactcaggctatgcaatcggggcaaactatcactgataatgttcagagagcacctaagaccatctctatcagcggtgttgtagtggttgattcgacgggttcagttctattaaccagacaggggcaacttgtagagacctttatttctacggttgaacaatggcgagaccagaagcaaatcatcactattgtttgtaaagatggaatatctatcactgatagtatcattactcagtttaaagcgagtaaagagcataccattgctaatggtcttcgtattcagatgaccttccaaggtgtagagtttcgttcaatcgtaggtcagactgatatttcggctgcaactggaaaagccgcgactacgaatgatggtggtgctaccagtaagaaaaatacagggaacactacaacaagcttgggtaacggtatgttgatgtgtcaggagctatataatcgctctacgagtgaacttactaatgagcaacttcaagcccgtatcaattgtggtaaaagtgtcaaagttgagaatggaaaaagcaccttctcagatgccgctaatgagcaagcttcaaaggtgcttaagtcgggtaatgctctacggaagtactctgtgaatccgaataagaagggcacttattgagacataaaaaggggcttcatagcccctgaaaattacagttgataagcgtcaatatccagtagctctttatcagcaatttcaaagattgatgttccatcatttagcggtaacgggtttgtaggtatggtgatttcagtgtcgttctgtagcgttacagttaccgaatccttacccaatgtaagcccttttagatgcttggacaaaatcaactgacactcgacacgacccgctttagttgtcaggtcaatatctttaagctggggtagttccttatcagtgagtgaagccttacgcctcatgttatcaatcgtggtctgtagctctgtacgcctctggttcagttccttaatctgaatttttagttcatcaatatcatccatctcaagaagtagggcggtagctttcttgattctggctgtgacaatttcaacctcatgctgtagagatgcaatcttcccctctgcttctccatcattccccacgtcaatcatccccagaaaattatcaatcatccacttatcaaacggtttacgcttcaacggtggaacatcacagcgaccgtcaggattgttattgcacctgtaaacccctgcatacttattcttagtccctgtagggtgaacactagccccacactgacaccggaataatcccttgaagatgttaatcgttaatgggttatcacttgcaggtgtacggcctttacggtttttatcgagaatctcttgagctttattgaacgttgatacatctatagcggcttcgtagtagttcggtatagcggggcggtcattgcgttgtgatgctggtagtgtgcctatcgttgtctctgaccttaagatagtacgcacagagtgaacactaaacccgttagcatctttacgccgtgagaatgaactaatgttattagcctgtaggtgacgtgcgatgttatgcagactttcaccatctagcagcagcttgaaaatcagtcttacagtctcagcgtgttcattgcacttgaaagtatcggggtcaatccatccgggaaccatctttgtaagacgttgttcaccagcaagggcaagctttgcacgttgtttccacttctggctaacacggaaagacttctgcttagactcttgatgagctacgtagcttttaacgcgctggatgattgagattcctaaatcatcggatagagcatcccttgtgtagattagcccatcctgtagagtgtgaatctcgataccatgagcaataatgcgattcatcaaggcttctgtttcaagatgttcaaggcggcctatgcggtcgatagcttcgactaacagaagtgtaccttctggaaactccccagactcaatacgggctaacatgtcaccaaactgaccagtaagatgcttacctttgtaaccactcaacccttcatcactgaaagacgctactacttgagcatcgctattcttcttcaaccattgcttgaacaggtcattttgtcgtctggttgaatctgcaccttcagcgccttgtatggctgatgagaatctcaagtatgttattacacttctcatggtgataaactctcatgcaattgattatcatttaaagatgaacttataaacgttatggctaatgctacaatgccgaatagctacaatacaatgacccttgatttacctcgccgcttcccctggccgacgttactttcggtctgcattcatggtgctgttgtggcgggtctgctctatacctcggtacatcaggttattgaactacctgcgcctgcgcagccgatttctgtcacgatggttacgcctgctgatctcgaaccgccacaagccgttcagccgccaccggagccggtggtagagccagaaccggaacctgagccgatccccgaaccgccaaaagaagcaccggtggtcattgaaaagccgaagccgaaacctaagccaaaaccgaagccggtgaaaaaggtacaggagcagccaaaacgcgatgtcaaacccgtagagtcgcgtccggcatcaccgtttgaaaatacggcaccggcacgcctgacatcaagtacagcaacggctgcaaccagcaagccggttaccagtgtggcttcaggaccacgcgcattaagccgtaatcagccgcagtatccggcacgagcacaggcattgcgcattgaagggcaggttaaagttaaatttgacgttacgccggatggtcgcgtggataacgtacaaatcctctcagccaagcctgcgaacatgtttgagcgtgaggtgaaaaatgcgatgcgcagatggcgttatgagccgggtaagccaggcagtgggattgtggtgaatatcctgtttaaaattaacggcaccaccgaaattcagtaagcagaaagtcaaaagcctccgaccggaggcttttgactattactcaacaggtaaggcgcgaggttttccttcaggatcaaccgcgacatacttaaataatgcttctgtcgctttatagcgttgcccaattggttcagacgctacttttttcacccacacttcaatattaatgctgaccgatgtcgtccctttctggacacagcgtgcatagcagcacaccacatcgccgaccgcaaccggccgtaagaaagtcattccttcaacccgcacagtcactacgcgaccgtgggcaatttcttttgccagaatagcgccgccaatatccatttgtgacattaaccaaccaccaaagatgtcaccattggcattggtatcggcgggcatggctaaagtacgtaaaacaagatcgccctgagggacgttatgtgttgtagacatggtaaaaccgacttaaaaggaaaatcacaggcgcgatgctactatgattttcctgaggagaacagaggagatacagcgccagccccgaaggactggcagtctggttaggatttatcttcctgcggcatgtggcggtagatatagataccgcttaacaatgtgaagattaaggtaagggcggtcaggccaaagactttaaagttgacccaaatattttgcggcagccagaatgcgatgtagatgtttgccagaccgcaaaggataaagaaaacagcccaggccagattcagcttcgaccataccggttgcggcagcgtgagttctttacccagcatccgctgaattagcggctttttcatcacccattggctgactaacagggctcccgcaaatagagcataaatgactgtaaccttccatttaataaactcatcattgtggaagaacagcgtcaagccaccgaagacgaccaccagaacaaaagtgatcagggccatcttctcaaccttacgaaagcgaacccagctatagataagcacaatcgccgtggcgacgatcagcgccgcagtagccgcatagatgtcataaatcttgtaaaacgcgaaaaagacaaccagcggtaaaaaatcaagaaactgcttcattttacgattccgtaatcaaatgcttaaggttattggcgaatcaacatatacaggcggaacagatagatgagcaatatggctgaaatcaggttgctcaaggtgttcgccagtacggcaccaatttccggggttaatgcggcaaaagaagaggcaaaaagcagcaacagtgtttttgccagcaaccagctcagtactgcgggtgccaccagacgcatattcgcccaagtcagccgcatactgctacgcatcgaggcaaaaacgcccattttgtcctgtaccaacatcaccggtgccagggccagtaaaatggccatgataattcccggaacgaccaccagcatgatgccaatctgtactaaaagggtagtcagaaaaatcagaataaataactttggcaatatcggcgcactggcaccaatagctcgcagcgcactgactctctgacccgcagacaccagctggataattaatattacgcctccggcgagaatggcgttaccgattaatcctgaaaaagtggacgccgctgaagcctgcagcaaaatttgttgctgttccggtgacatattctgaaccaggtcgaacaacccactactgccgctaacgggcacgccgtcattgagctgcgcaagctgtgcatcactgggtgagaaaacatgccctaacaccactgtgataaacgcacatagcaacgataccaacagaatggtcataaattgattacggaagaaatttccggtgtcacggtatacggactgcgccgtgatagacatgcactctccttgagttttatgcaggtgttaattagcgggcaattgtaccctggttaagcctcgggtggcagcatcaggtcttgtatggaaaagcatatctttgtaaagcggaggtaattgctggccttcaggcatgggcaaatcgcggcaagtggcgaccgagttaatatttgcgtagcgaaaatatttaaaaattgatttaaatcacattaaccaggattctcaatgcaacttctaaattaatccagatcaataaagggtgaattatcatatgtaatgtgatctatgtaggatcatttgttactccaatgtaggtatattcgtcacgtttttataaccataacgacggagcggatatgaaaaagttaacagtggcggctttggcagtaacaactcttctctctggcagtgcctttgcgcatgaagcaggcgaattttttatgcgtgcaggttctgcaaccgtacgtccaacagaaggtgctggtggtacgttaggaagtctgggtggattcagcgtgaccaataacacgcaactgggccttacgtttacttatatggcgaccgacaacattggtgtggaattactggcagcgacgccgttccgccataaaatcggcacccgggcgaccggcgatattgcaaccgttcatcatctgccaccaacactgatggcgcagtggtattttggtgatgccagcagcaaattccgtccttacgttggggcaggtattaactacaccaccttctttgataatggatttaacgatcatggcaaagaggcagggctttccgatctcagtctgaaagattcctggggagctgccgggcaggtgggggttgattatctgattaaccgtgactggttggttaacatgtcagtgtggtacatggatatcgataccaccgccaattataagctgggcggtgcacagcaacacgatagcgtacgcctcgatccgtgggtgtttatgttctcagcaggatatcgtttttaattccgcacaaaaacgaccccgtaatatacggggtcaataaggacatggtataaagggtattatttcttcgcttctacgccatcagtttcagagcgaattaaaaatttctcagttgtttgcggaatattctgaatcagccagtcggccatttgcttttcctcatttaaaatcgcttcgatggttggaattgaagctgtatcaccggcattttttgctgctgctaatagtgaggtgtaacaggcgatttcaaattgctcgaagacatatccgctaatagagcctttgactatttcatcagaagggaatataccaccgattgactgcccaagcgcagccattttactcatggaatctttaatgactgaacgtgaaatgtcattacgatcaagaatagtttccagttgaacaatctggtttttggtttcactaagatgttgttcaatacgagcgcgtagttcaggataattatctatacggctggccatggattcaagcatagattcggcttgcttttccattgcgtgggcgtcacgtaaccagtcatgataatgttcaatacgattcatgaaaatgtcctctttataaaatgactaaaagttaaaattcatatttcaggctttattttcggctttcttatttacgttattaatggccagatcagtcagtttgatgtcggtggccttttcttcttccagggtttctttcagaagcttcgctgctttacggtaacctaattgttcagccagcgtcgctaatgtcccgtaactggcaatctcataatgctcgactttctgtgctgcggcaatcagtgcggcatcacgcacttcgtttttctcggtactttcgatgacctcattagcttcttcaataagaccttccattgccacacatttcatgcgcttaattttcaggttcgattcggactccacaacttgatcaatacgttcaatctgtccatgagtttcctcgaggtgcgcatgaaaagcctgacttaatttttcatttgatgttgctcttgcgagttttgccagtgcccgggttaattgtttttctgcgctgtaggtatctgaaagcaggtgaataaatacatcttcaatggtcttcatattcatatttttctccagtgaaatcactgcgagccatacggcccgcagatgcaattatctttatcagctgatattaataattaacggtgaatcaggatttgcctgatttattaccaccgctttgttgaccgccttttttacccgcttcagatgcgcgttgcggatcatttttaaaattaccgccgctatgctgaccgcctttacggcctgcgtcggatgccttctcacggtcttcggcgaaatttcctgaaccaccacgatgttcggccatgttatttctcccgttgcgttgcattgtttcattaatatgagtgttgtgtgtcgacactcattaaaattagtcgctaatgagaattagtcaaattaagcgcaacgagaagatagatggaaaatatattttgaggaacattctggatatattaacaattacctgaggaataagtgacttagagaaaattattgattttactggtgttatgttgtgggattaatttgtttgattatattactgttgggcggaaaaatgacgtaagttgacgttcgaccggggtaagcgaaacggtaaaaagataaatattaaatgaatttaggatttttccggcttcattaaagaaagttaaaatgccgccagcggaactggcggctgtgggattaactgcgcgtcgccgctttcatcggttgtacaaaaactttcagtgccgccagcattttctctggctcattaatatgttgctcgatgattttaacaatggccgaaccagaaatcgcgcccgcagctcctgcatcaatcgctgcttttacctgatccggggcggaaataccaaatccctgcaatggaggtgcagcgttgtactctttcagcttcgcaaccagatgattgaggggtaacgcggcgcggttttctgcgccggtcacgcctgctcgtgacagcaaataggtgtaaccacgaccgtaagaggctatctggcgcagcaggtcgtcatcggcatttggcgggcagatgaagataggtgcgacattatgacgcaacgcggcctggcggaagggcgcggactcttcaactggcacatcggcaaccagcaccgaatcgacgccgactttttcgcactgggcataaaactcatcaatgcctttgttaaacaccagattggcatacatcaacaggccaatgggaatggtcgggtgtttctggcgaatcagtgccagcatttcaaaacattgtgccggagtcacacctgccgcaaaggcgcgcagagtggcgttttgaatcgtcgggccatccgccagtgggtcggagaaggggatacctaactccagcgcgtcagcaccggcttcaattagcgtatcgataattttcaatgactgctcaatgcccggatcaccgagcgtgacgaaaggaacgaatgcgccttctttgcgctccttcaactgggcaaacagagattcgtagcgttccatcagatttcccctcgtgctttcaaaatatcgtgaacggtgaagatgtctttatcgccgcgaccggaaaggttaaccaccagtagctgctctttatccgggttttcgcgcatcattttcaacgcatgggccagggcgtgggaggattccagcgccgggatgatcccttcgtgcaggcacagcgttttgaaggcttcaagggcttcatcatcggtaatagacacgtaatcagcgcgtccagtgctgttaagatacgcgtgttgtgggccgacagacgggaaatccagtccggcggagatggagtaagattcttcaatctgcccgtcttcggtttgcatcatcggcgctttcataccgaaatagatacccacgcgaccatgttttagcggtgcgccgtgctcgccagtttcgataccgtgaccacctggctccacaccaatcaggccgacgttggtttcattgatgaaatcagcaaacatgccgatggcattcgaaccgccgccaacacaggcgataacggcatccggcaggcgaccttctctttccagaatctgcgctttggtttcttcgccaatcatccgctgaaactcacgcacaatggtcggataaggatgcgggccagctgcggtgcccagcatatagtgcgcggtttcgtaactaccggaccagtcgcgcagcgcctcgttacaggcatctttcagcgtcgcggaaccgctatgcaccgggatcacttccgcacccattaagcgcatacgaaaaacgttaggcgactggcgttcaacgtctttggcacccatataaatacggcatttcaggccgagcagggcgctggcaagggccgacgccacgccatgctgaccggcaccggtttcggcgatgatttcggttttacccatccgcttcgccagcaacgcctgccccagcacctggttagttttatgcgcgccgccgtgcagcaaatcttcacgcttgagatacagcgtggtgttcgtcccggctgtaatgttctggcatttggtcagcgcggttggacgcccggcatagtttttcagcaggtcgttgaactgagcctgaaattcaggatctttttgcgcactgacaaaagcttcttccagctggcgcagagcaggcatcaggatttgtggcacgtacatgccgccaaactcaccaaaataggggttaagtaatgttgtcattgttcctttccttaatatgcgcgcagcgtctggaaaaccgaggccaaaagacgtgcgtctttgatgcccggttgcgactctacagcagaattaaaatcaagtccggcgcagccggtttgtgccgcttccacgcagttatctgcgcctaagccccccgccagcagaacgttgccaagcgattgaccatttaatagtgaccagtcaaaacgttgcccgcttccaccctggccgttgtctaaaacatatttatcaacgtgctgaaactcgcgggcgggcagggtttcaccgacgcttaatgctttccagatggcaacatgtgctggcagagcttcacgcagcgtatcgatatacagctgttcttcattaccatgcagttgcactgccgccagcgataacaccttagctttgtccaccacatcggcaatatcgtgattgcggaacacgccaacatactgcaacggtgccgcagccatcacttcctgcgcctgttcaacgttgacgcaacgcggtgatgtcgcaacaaaaatcaacccaccgtaaatcgcgcccgcgtcataagctgctttagcatcttgcccacgcgtcaggccacatactttattctcacccagcaacacccggcgcacggcggcgtgcaaatcgtcatgggccatcaacgccgaaccaatcagaaaaccgttagcgaagtggcttaactcgcgcacctgagcgtaagtattgatgccggattcgctgattaccgtcacgttgtgccccagtttcggcgcaagctcgcgggtacggttgagatcaatcgacaaatcacgcagatcgcggttgttgatgccaacgacctttgcccccaatgcaatggcacgctccagttcctcttcattactgacttcggtcagcacacccatctccagactgtgggcgacggcggcaagctggcgatattgttcgtcatccagtactgaaagcattaataagcaggcatcagcctggtaatagcgcgccagatagatctggtaaggatcgataatgaagtctttacataaaatcggctgcggggcgatttggctgacgatggggaggaaatcaaagctcccctgaaaatatttctcatcagtcagcaccgaaattgccgaagcgtaatgtttataaatggcggcaatgcgtgctggatcgaaatcatcacggatcacgccttttgacggcgacgctttcttgcactccagaataaacgccgtgcgcgcaccctgtagcgcatcataaaaatgtcgcgtgctcggctgaacctcattctgaaaactggccagcggttgctgctgtttgcgggtttctacccaaatcgccttgtctgcgacgattttcgctaaaacggtttgcatcatttaccctcgtgccgccagtgcggtaactctgtcgtaagcggaaccactgcgcagtacctcaagaacggtttgcgcattggcttgcagatcttcatggccatgcaggcgcattaacatggcgacgttcgcagcgacggctgcttcatgggcggcgtcgcctttaccttgtaacaagcgtgttaaaatgtcacggttttcttccggtgttccgcctgccagttgctcctggtggtagggagtcaggccaaaatcttcagcggtcaattgatagctcttaatttcgccgtcatgcagctcggcaacgattgtcggcgcgtgtaatgaaacttcatccatcccgccgctgtgcaccaccgccgcgcgttgataccccagcacgcgcaaggtttcggcaatcggcagcaccagttccggactataaacaccaattaacgccagcggcggatgcgccgggttaatcaatggccccagcacattgaacagggtgcgggttttcagttgctggcgaaccggcatcgcgtggcggaatccggtgtgatacttcggcgcaaagaggaaacatacacctaactcatccagcgcctggcgcgatttatcggcgttcatatcaagattaataccgaacgccgccagcagatcggacgaaccagatttactggagacgctacggttgccgtgtttcgccactttcagcccacaggccgcggcgacaaacgcactggcggtagaaatattgatactgttgctgccgtcaccgccagtaccgacgatatcagcaaacagataatccgggcgcgggaacggcgcggcgttttccagtagcgcggttgctgctccggcgatctcgttcgggtgctcaccgcgaattttcatgctcaccagcgccgccgccagttgttccggcttcagctcgccacgcaccaccgctgaaaacagctggtggctttcttgttggctaagcgtctgcgcctgatacagtttttccagaatcggttgcagcgtgttggctggctctagtttctgctgcgcccaggccagcgtttgttccagcaggcgagcgccctgggtggtgagaatggattccggatggaactggaatccacaaacgcgatccgcatcgtgacgtactgccatcaccatgccattaaaatgggcgttgatggttaaaccggccggaatgttactgccaaccagcgagtgataacgcgccaccggcagcgggtttgttaatccggcaaacatcgcctgaccgtcatgttcaatgctcgacgctttaccgtgaagaatttcgcccgcctgaccgacatagcccccgtaagcttcgacaattgcctgatgtccgaggcaaatgccaataatgggcagcttgccacgcaagcgggtgaggagttccggcatacaaccggcttcgctcggcacaccggggccaggagaaagcatcagtaccggattgctcatcgtcgccaggcgttcaattaaggtctgcgccggaatatggttgcggtaaatcaccacgttatgaccattgctgcgcaactgatctgccaggttgtacgtaaaagagtcgatattatcgagcagcagaatgtcagccatcagaaagtctcctgtgcatgatgcgcggtggcaatagcgcgcagtacagcgcgggctttgttacgggtttcgtcggcttccgactgcggaacagaatcaaggactacaccagcacccgcttgcacggtggcgataccgttttccaccagcgccgagcggatcacaatgcaggtgtcgagatcgccatgcgcggtgaaataacctaccgcgccgccgtagctgccgcggcgacgaccttccgcctcggcaattaactgcatagcgcgtactttcggcgcaccgcttaacgtccccatattcatacaggcgcgataagcgtgcagggcgtcaagatcgtgacgcagttcgccgactacgcgagagacgaggtgcatcacataggaataacggtcaactttggtgagatcggcgacgtagcggctgccgggggtgcaaatgcgtgccagatcattacgggcgagatcaaccagcatcagatgttcagacagctctttatgatcggtacgcatttccagttcaatacggctgtcgagatctctgtccagtgaaccatcggcgcgacgaccgcgtgggcgtgttccggcaatcgggtagatctcaatctggcggctggtggcatcatacttgagcgagctttccggcgacgcgccaaatagggtgaaatcattatcctgcataaaaaacatgtacgggctgggattactctttttcagcacgtaataggccgccagcggtgacgggcagggcagagagaaacggcgagatggcaccacctggaaaatttctccagcgcgaatcgctttttgcaacaaacgcactacgccaccgaactcttcatcgctctgattacattcacaacgcatatgcggcacggaaaccactggcagcggcggcgcggcttcggtcagttgctgacgtagttcgttcaggcgagcagtgagacgttgtttttcttcttcattcggagcaaacaggctggcctgaatacgggtgctttttttctgatggtcaatcaccatcagcgtttcagcgagataaaaacagaaatcagggcagttattttccgctgacagttgcggtaaatcttcaaatcccgccacaaggtcataagagaacaggccgccgaagaacatggcttctcgttcttccttcggtacattcaacagattctgcaataaacggaaagcgtcaaaaaccgaaagggagcataagcgggcgtcttcatccagcagtggactgacaggggggaagcgcagcacacggcagtttggtgattgttcactttccacacccgcaggcagggcgttatccagtagtgccagcagggcttcgccgttgccggaaagtgcctggattgtgacagtgtcacctaaagctgtaatgcgcagcgcactgtctaccagcagcaggctttttaaatcatctttgctgtcgatatctgcggattccagcagcagcgttgccggacgatccccacacaactggtgaaaaagcgcggtgggattgtcgcgataagcgccttcgcaggttagcagttcgagagtcggtttttgtgtttgcattgttattctctaattttgttcaaaaaaaagcccgctcattaggcgggctgggtatctgattgctttacgcatggtgaatacactgcccgtttcaggaagtgcgccaccaacctttcagtacgaaaattgctttcattgtcgataccctttttacgtgaacttgcgtactagttaactagttcgatgattaattgtcaacagctcatttcagaatatttgccagaaccgttatgatgtcggcgcaaaaaacattatccagaacgggagtgcgccttgagcgacacgaattacgcagtgatttacgacctgcacagccataccacagcttccgatggctgcctgacgccagaagcattggtgcaccgtgcagtcgagatgcgcgtcggcaccctggcgatcaccgaccatgacaccacagctgcaatcgcaccagcaagagaggaaatttcacgttcgggactggcgctgaatcttattcccggcgtggaaatttccacggtctgggaaaatcatgaaattcatattgtcgggctgaatattgatattactcatccgctaatgtgtgagttcctcgcgcagcagacagaacggcgcaatcagcgggcgcagctcattgccgaaagacttgaaaaagcgcaaatacctggggcgctggaaggcgcgcaacgactggctcagggcggcgcagtgacgcgcggtcattttgcgcgtttccttgtggagtgcggcaaagccagttcaatggcggatgtctttaaaaagtatctggcgcgcgggaaaaccggatacgttccgccacagtggtgtacaatagaacaagctattgatgtcattcatcattctggcggtaaggcggtgctagctcatcctgggcggtacaatcttagtgctaaatggctgaaaagattggttgcgcattttgccgaacaccacggcgacgcgatggaagtcgcgcagtgccagcaatcgcccaatgaacgcacccagttggcgacccttgcgcgtcagcatcatttatgggcatcacaaggatctgattttcatcagccatgcccgtggatcgaactgggtcgtaaactctggctgcccgcaggcgttgaaggcgtctggcagctatgggaacagccgcagaacaccacagagagggaattatgagccagtttttttatattcatcctgataacccacagcaacgtctgatcaaccaggcggtggagatcgtgcgtaaaggcggggtgattgtttatccaactgattccggctatgcgctcggctgtaaaattgaagataaaaacgccatggagcgtatttgtcgtattcgccagctgccggacggtcacaactttaccctgatgtgtcgcgatctttctgaactctcgacctattcatttgtcgataacgttgcgtttcgtttaatgaaaaacaacacgccgggcaactataccttcatcctgaaggggacgaaggaggtgccacgccgtctgttgcaggaaaaacgcaaaaccatcggtatgcgtgtgccttctaacccgattgcgcaagcgttgcttgaagcattgggcgaaccgatgctttccacttcgctaatgctgccaggcagcgaatttaccgaatccgatccggaagaaattaaagaccgtctggaaaaacaggtagatttgattattcacggcggttatctcgggcagaaaccaacaacggttattgatcttaccgatgatacgccggtcgtggtgcgtgaaggcgtaggtgatgtgaagcctttcttataacaaattgcgttccatggatggaagactatggcagggaagtttcgctgcattttgctgttgatagcagggctgtttgtatcatctctaagttatgcagaaaacacggagatcccttcttatgaagaagggatctcgctctttgatgttgaagccactctgcaaccagatggggtgctcgacatcaaagaaaatattcattttcaggcgcgaaatcagcagattaagcacggcttttatcgtgatttaccacgactctggatgcagcctgatggggacgctgcactgctgaactatcatattgttggcgtcacccgtgatggtattcctgaaccctggcatcttgactggcatatcgggttaatgagtattgtcgtgggcgataaacaacgtttcttgcctcaaggcgactatcattatcaaattcattatcaggttaaaaatgctttcctgcgtgagggggattctgatctgctaatctggaacgtgaccggtaaccactggccgtttgaaatttataagacccgtttttctctccagttctctaatattgcgggtaatccatttagcgaaatcgatctctttaccggagaagagggcgacacatatcgtaatggccgcatccttgaggacggaagaattgaatcccgcgatccgttttatcgtgaagatttcacggtcctctaccgctggcctcacgctttacttagcaatgcctcggctccgcaaacgacgaatattttcagccatcttcttttaccctccacgtcatcgttgttaatttggtttccgtgtctgttcctggtttgtggatggttatatctctggaagcgcaggccgcaatttacgccggtagatgtgattgaaaccgatgtcattccgccagattacacgcccggcatgttacgtctcgatgcgaagctagtttacgacgataaaggtttttgtgccgatatcgtaaatctgattgtgaaaggaaaaattcatctggaagatcagtctgacaagaaccagcaaatcctgattcgtgttaatgaaggcgcgaccagaaataatgcggtattactgcccgcagagcagttattactggaagcgttatttcgtaaaggcgataaggtcgttcttacggggagacgcaacagagtcttacgcagggcatttttacggatgcagaaattttatctgccgcgtaaaaagtcttcgttttaccggtctgatacttttttgcaatggggtggactggcaatattggcggtcattctttacggtaacttgagtcctgtaggctgggcaggaatgagtctggtgggcgatatgtttattatgatctgctggattattccttttttattttgttcccttgagcttttgtttgcccgcgatgatgacaagccttgcgttaatcgtgtaatcatcactttgtttttaccactgatttgttcaggcgtggccttctattctctctacatcaatgtcggagatgtattcttttactggtatatgccagcgggttattttaccgctgttttcctgaccggttatctcactggcatggggtatatttttctgccaaagtttacccaaactggacagcaacgttatgcccacggtgaagctatcgttaactatcttgcgcgtaaagaggcggcaacacacagtgggcggcgtcggaaaggggaaacacggaaactggattatgcgttgctaggttgggcggtctcggcaaaccttggcagagaatgggcagcacgtatcaccccatcactcacagcggctgttcgcgccccggaaattgcccgtagcggcgttttattctcattacagacgcacctaagttgcggggcctataccagtttgttggggcgaagttattccggtggtggtgctggcggcggcgcgggtggcggaggcggtggtggctggtaattaagctgatgttaatcgaaacaagctttaaccataaagatagtgtagtatgttgcgcctcaaagccaggccagttaaaacgtcgagtcgtttacttaaggcctgaggagttcaaacagactttactatcagtgagtcagatgtaagttctgactcactgttgcacaaaagcatatcagacgcctgggaaggcgacaccaaaaggaagctctatgagcgaaaagctacagaaagtgctggcgcgtgccggccacggttctcgccgtgaaatcgaatctattattgaagccggtcgtgtgagtgttgatggcaaaattgctaaactcggcgatcgcgttgaagttacccctggattgaaaatccgtatcgatggtcaccttatttcggtacgtgagtccgctgaacaaatttgtcgcgttctggcttattacaaaccggaaggtgagttgtgtacccgtaacgatccggaagggcgtccgacggtgtttgaccgtctgccaaagctgcgtggcgcacgctggattgccgtaggtcgtctggacgttaacacctgtggtctgctgctgttcaccactgacggtgaactggcaaaccgtttaatgcatccaagccgtgaagttgaacgtgaatacgccgtgcgtgtatttggtcaggttgacgacgcgaaactgcgtgatttgagtcgtggcgtgcaactggaagatggtccggcagcttttaaaaccatcaagttcagcggcggcgaagggatcaaccagtggtacaacgttactctgaccgaaggccgtaaccgtgaagttcgtcgtctgtgggaagcggttggtgtgcaggtcagccgcctgatccgtgttcgttacggtgatatcccactgccaaaaggtctgccacgcggtggctggacggagctggacctcgcccagactaactatctgcgcgaactggtggagctaccgccagaaaccagctctaaagtcgctgtagaaaaagaccgtcgtcgcatgaaggcgaatcagattcgtcgtgcggtgaaacgtcacagtcaggtgagcggcggtcgtcgttctggcggacgtaataataacggttaatcaaagtatgccggacgtcatatccggcatttttacagattaataatcgatccctatctgcgcttttacaccggcatcaaacgcatgtttgacggggcgtaattcacttaccgtatctgccagttcaagaatatcccgatgacaaccacgacccgtgataatcaccgtctgttgatgtggacgttcatttaacgcctgcaccacttcttccagtggcaaatagtcatacgccaccatatacgtcagttcatcaagcaaaaccatatccagtgaggaatcagcaagcatccgctttgcatgttgccagacttcgcggcaggcggcggtatcagactcgcggttttgtgtatcccaggtaaagcccgttgccatcacctgaaactcaacgccatgtggctccagcagattgcgttcgccattaggccaggtgcctttaataaactgcacgacgcctactttttttccgtgaccaactgcgcgtgttgccgtaccaaatgccgcggtggttttgccttttccattgccggtaaagacgatgataataccgcgttcatcctgggcctgggccacacgagcatctactttttctttcactcgctgctgacgctgttggtagcgttcatcactcattgggaaattcctggtttacggcccggttgggcgtcaaaggtcatgccggttttacggcggctgtcatcgcccatcagccagaggtagagcggcatgatatcagcgggtgttttaagtttctgtggatcttcggtcgggaaggcgctggcacgcattgcggtgcgcgtaccgcctgggttaatgcagttgacgcgcaggcgctgctgatattcatcggccagtacctgcatcatcccttcggtggcaaatttcgacgctgcatatgcgccccagttggctcgtccctgacgtccaacgcttgatgaagtaaagaccagtgaaccggcgtccgatttgagtaataaaggaagcagtgcctgggtgagcataaaggtggcattaacgttgacctgtatgacgtcctgccagacctgtggattttgttcgctcattggacaaacatcgccgagcaatccggcattatgcaaaacaccatccagacgcggataattaacggcaatgcgctgtgccagttgttggcaatcttcggacgtgcaggtcagcaaatcgagaataaaccactgtggctgacgcccagtttcttcgtttatgtggctggctacctgacgtaatttttcttcattacggcccaacagaatcactgtcgcaccatagcgtgcatacgtcatcgcggcttcacgaccaataccatcactggctcccgtcaccaggataatgcgatcattgagtaaatcttgttttggctggtaatgcatggctactcctcaacgacgttgtctgtcgcgctgccagtgtactttatgactttggggctttatgcctgaaacagaagggcatttcaatcagcctggggcgataacaccgcaaaatggatactttgtcatactttcgctgcaataacatctctgcgagacggcttaacatgcctgttgtaaactgtgagccaaagcgttgtttaaccaaggtggggactcgtggaattgttgtctgaatatggtttgtttttggcgaaaatcgttaccgttgtgctagcgattgcggcgattgccgccattattgtcaatgttgctcaacgtaataaacgccagcgtggcgagttacgggtcaacaatctcagcgaacagtataaggagatgaaagaagaactggccgcggcgctgatggactcacatcagcaaaaacagtggcacaaagcgcagaagaaaaagcataagcaagaagcgaaagcagcaaaagcgaaagccaaactgggcgaggtggcaactgacagtaaaccccgcgtctgggtgctggattttaaaggcagcatggacgcccatgaagtgaactcgctacgtgaagagataacggctgtactcgcagcattcaaaccgcaggatcaggttgtgctacgtctggaaagccctggtggcatggtgcatggttacgggttggcggcttcgcagctgcagcgtctgcgtgataaaaacattcctttaactgttacggtagacaaagtcgctgccagcggcggttacatgatggcctgtgtggcggacaaaattgtttccgcaccgtttgctattgtgggttccattggcgtggtggcgcaaatgcccaactttaaccgcttcctgaaaagcaaagatattgatatcgaactgcacaccgccgggcagtataagcgcacgctgaccttgctgggtgaaaacaccgaagaagggcgggagaaattccgcgaagagctgaacgaaacgcatcagttatttaaagattttgtgaagcgtatgcgtccgtctctggatattgaacaggtggcaacgggtgaacactggtacggacaacaggcggtagagaaaggcctggttgatgaaatcaacaccagtgatgaagttattcttagcctgatggaaggccgtgaagtggttaatgtacgctatatgcagcgtaaacgactcattgaccgattcaccggcagcgcggcagagagcgccgatcgattgttgttacgctggtggcagcggggtcaaaagccattgatgtaaaagacaaacgcgagggtaagacctcgcgttttgctttaatcaaccaggtgatatttttctgaaagcacatgggccaggtgtttgaacatattaaacaccgcggtgcttttggctgttggcaatccttgttcatctaaaaagtagtcgccggtaaataccagcacgccattacgctgcgtgacgccggtggcttcaatccctgcgagcgtatcctcatgctcacgaatgattttgttggcctctttcaacagcgtttcgcggtcgatgggttgtgtctctttgttcattatttactccttaaacaaggacattagtctacgccaggcatggcttgcagacaaatataccacgctggtggcaagagcgccttactggcaactttggattttgcatgctaataaagttgcgtatcggattttatcaggtacagtgtgacgctttcgtcaatctggcaatagatttgcttgacattcgaccaaaattccgtcgtgctatagcgcctgtaggccaagacctgttaactcagtcacctgaattttcgtgaacagagtcacgacaaggggttgatatccgcagagagcgagtccatatcggtaactcgttgccagtggaaggtttatcaacgtgcgacgcattcctggaagaatcaaattaggtaaggtgaatatgggtaaagctcttgtcatcgttgagtccccggcaaaagccaaaacgatcaacaagtatctgggtagtgactacgtggtgaaatccagcgtcggtcacatccgcgatttgccgaccagtggctcagctgccaaaaagagtgccgactctacctccaccaagacggctaaaaagcctaaaaaggatgaacgtggcgctctcgtcaaccgtatgggggttgacccgtggcacaattgggaggcgcactatgaagtgttgcctggtaaagagaaggtcgtctctgaactgaaacaactggctgaaaaagccgaccacatctatctcgcaaccgaccttgaccgcgaaggggaagccattgcatggcacctgcgggaagtgattggtggtgatgatgcgcgctatagccgagtggtgtttaacgaaattactaaaaacgcgatccgccaggcatttaacaaaccgggtgagctgaatattgatcgtgttaatgcccagcaggcgcgtcgctttatggaccgcgtggtggggtatatggtttcgccgctgctatggaaaaagatcgctcgtggtctgtctgccggtcgtgtgcagtcggtggcggttcgcctggtggtcgagcgtgagcgtgaaattaaagcgttcgtgccggaagagttctgggaagtcgatgccagcacgaccacgccatctggtgaagcgttggcgttgcaggtgactcatcagaacgacaaaccgttccgtccggtcaacaaagaacaaactcaggctgcggtaagtctgctggaaaaagcgcgctacagcgtgctggaacgtgaagacaaaccgacaaccagtaaacctggcgctccttttattacctctacgctgcaacaagctgccagcacccgtcttggatttggcgtgaaaaaaaccatgatgatggcgcagcgtttgtatgaagcaggctatatcacttacatgcgtaccgactccactaacctgagtcaggacgcggtaaatatggttcgcggttatatcagcgataattttggtaagaaatatctgccggaaagtccgaatcagtacgccagcaaagaaaactcacaggaagcgcacgaagcgattcgtccttctgacgtcaatgtgatggcggaatcgctgaaggatatggaagcagatgcgcagaaactgtaccagttaatctggcgtcagttcgttgcctgccagatgaccccagcgaaatatgactccacgacgctgaccgttggtgcgggcgatttccgcctgaaagcacgcggtcgtattttgcgctttgatggctggacgaaagtgatgcctgcactgcgtaaaggcgatgaagatcgtatcttaccggcagtcgataaaggcgatgctctgacgctcgttgaactgacaccagcccagcactttaccaagccgccagcccgtttcagtgaagcatcgctggttaaagaactggaaaaacgtggtatcggtcgtccgtctacctatgcgtcgatcatttcgaccattcaggatcgtggctatgtgcgagtagaaaatcgtcgtttctatgcggaaaaaatgggcgaaatcgtcaccgatcgcctggaagagaatttccgcgagttaatgaactacgacttcaccgcgcagatggaaaacagcctcgaccaggtggcaaatcacgaagcagagtggaaagctgtactggatcacttcttctcggatttcacccagcagttagataaagctgaaaaagatccggaagagggtggtatgcgcccgaaccagatggttctgaccagcattgactgcccgacttgtggtcgcaaaatggggattcgcacagcgagcaccggggtattccttggctgttctggctatgcgctgccgccgaaagagcgttgcaaaaccaccattaacctggtgccggaaaacgaagtgctgaacgtgctggaaggcgaagacgctgaaaccaacgcgctgcgcgcaaaacgtcgttgcccgaaatgcggcacggcgatggacagctatctcatcgatccgaaacgtaagttgcatgtctgtggtaataacccaacctgcgacggttacgagatcgaagagggcgaattccgcattaaaggttatgacggcccgatcgttgagtgtgaaaaatgtggctctgaaatgcacctgaaaatggggcgtttcggtaaatacatggcctgcaccaacgaagagtgtaaaaacacacgtaagattttacgtaacggcgaagtggcaccaccgaaagaagatccggtgccattacctgagctgccgtgcgaaaaatcagatgcttatttcgtgctgcgtgacggcgctgccggtgtgttcctggctgccaacactttcccgaaatcgcgtgaaacgcgtgcgccactggtggaagagctttatcgcttccgcgaccgtctgccggaaaaactgcgttatctggcagatgcgccacagcaggatcctgaaggtaataagaccatggttcgctttagccgtaaaaccaaacagcaatatgtctcttcggaaaaagacggaaaggcgactggctggtcagcattttatgttgatggcaaatgggttgaagggaaaaaataacctttaattctgtcaggtttttataaacaaagggtcgcgaaagcggcccttttttattgcatattattttttcttcacacctatacactaaggctataaatgatatagtggttatagttagcaccttttttattattaaatcgtattagtcacgccgcctggtgtgacgaaaaaacgatgttctgatggcgtctaagtggatggtttaacatgaaattacaacaacttcgctatattgttgaggtggtcaatcataacctgaatgtctcatcaacagcggaaggactttacacatcacaacccgggatcagtaaacaagtcagaatgctggaagacgagctaggcattcaaattttttcccgaagcggcaagcacctgacgcaggtaacgccagcagggcaagaaataattcgtatcgctcgcgaagtcctgtcgaaagtcgatgccataaaatcggttgccggagagcacacctggccggataaaggctcgctgtatatcgccaccacgcatacccaggcacgctacgcattaccaaacgtcatcaaaggctttattgagcgttatcctcgcgtttctttgcatatgcaccaaggctcgccgacacaaattgctgatgccgtctctaaaggcaatgccgatttcgctatcgccacagaagcgctgcatctgtatgaagatttagtgatgttaccgtgctaccactggaatcgggctattgtagtcactccggatcacccgctggcaggcaaaaaagccattaccattgaagaactggcgcaatatccgttggtgacatataccttcggctttaccggacgttcagaactggatactgcctttaatcgcgcagggttaacgccgcgtatcgttttcacggcaacggatgctgacgtcattaaaacttacgtccggttagggctgggggtaggggtcattgccagcatggcggtggatccggtcgccgatccggaccttgtgcgcgttgatgctcacgatatcttcagccacagtacaaccaaaattggttttcgccgtagtacttttttgcgcagttatatgtatgatttcattcagcgttttgcaccgcatttaacgcgtgatgtcgttgatgcggctgtcgcattgcgctccaatgaagaaattgaggtcatgtttaaagatataaaactgccggaaaaataatttcttgcgttattttcggcaccttttatgtagcgaaggtgccggaatatattctcttttgttacttatttgtataccgtgcacaatatttttatccctcatatttatagggtaaattacctgtaaagtagtgtctaattacccgcctcgcaaattccagttttcaaatatctatttcaggtcaaaagattgaattattcactggagacgattcgtaaattcgctggatttttgactaaagtttctttaggatttgtctcatcgtatgattaattacaccaatcgttcaacgtcttgctgataagtgatggcgattatatgaggttagcaatgccttctggaaatcaggaaccccgccgcgatcctgaattaaaacgtaaagcctggctggcggtttttcttggttctgcacttttctgggtggttgtcgcactgctgatttggaaagtgtggggataactatggtcggtcaggagcaactggagtcgtcaccattatgccagcatagtgacaatgaaacagaaacgaaacgggaatgttccgtcgttattccagacgactggcaactaacatcgcagcagcaagcctttatagaactgtttgctgaagatgatcagccgaaacaataattatcatcattcttattacccatttttaatgaattacagggcttttaatacaccgcagcaataacaggttgagttatctcaacacaaagtaataaccgttaagggtgtagcctatgatcaacacaaatatgaaatattggtcctggatgggcgcgttttctctgtcgatgctcttctgggccgaactcctctggatcattactcactgatccctgaccccgttgcggcggggttttcatttgctttgccacaaggtttctcctcttttatcaattttggttgttatcaaatcgttacgcgatgtttgtgttatctttaatattcaccctgaagagaatcagggcttcgcaaccctgtcattaaggaggagctatgtcgtcaaccctacgagaagccagtaaggacgcgttgcaggccaaagataaaacttaccactactacagcctgccgcttgctgccaaatcactgggcgatatcacccgtctacccaagtcactcaaagttttgctcgaaaacctgctgcgctggcaggatggtaactcggttaccgaagaggatatccacgcgctggcgggatggctgaaaaatgcccatgctgaccgtgaaattgcctaccgcccggcaagggtgctgatgcaggactttaccggcgtacctgccgttgttgatctggcggcaatgcgcgaagcggttaaacgcctcggcggcgatactgcaaaggttaatccgctctcaccggtcgacctggtcattgaccactcggtgactgtcgatcgttttggtgatgatgaggcatttgaagaaaacgtacgcctggaaatggagcgcaaccacgaacgttatgtgttcctgaaatggggaaagcaggcgttcagtcggtttagcgtcgtgccgccaggcacaggcatttgccatcaggttaacctcgaatatctcggcaaagcagtgtggagcgaattgcaggacggtgaatggattgcttatccggatacactcgttggtactgactcgcacaccaccatgatcaacggccttggcgtgctggggtggggcgttggtggcatcgaagcagaagccgcaatgttaggccagccggtttccatgcttatcccggacgtagtgggcttcaaacttaccggaaaattacgtgaaggtattaccgccacagacctggttctcactgttacccaaatgctgcgcaaacatggcgtggtggggaaattcgtcgaattttatggtgatggtctggattcactaccgttggcggatcgcgccaccattgccaatatgtcgccagaatatggtgccacctgtggcttcttcccaatcgatgctgtaaccctcgattacatgcgtttaagcgggcgcagcgaagatcaggtcgagttggtcgaaaaatatgccaaagcgcagggcatgtggcgtaacccgggcgatgaaccgatttttaccagtacgttagaactggatatgaatgacgttgaagcgagcctggcagggccaaaacgcccacaggatcgcgttgcactgcccgatgtaccaaaagcatttgccgccagtaacgaactggaagtgaatgccacgcataaagatcgccagccggtcgattatgttatgaacggacatcagtatcagttacctgatggcgctgtggtcattgctgcgataacctcgtgcaccaacacctctaacccaagtgtgctgatggccgcaggcttgctggcgaaaaaagccgtaactctgggcctcaagcggcaaccatgggtcaaagcgtcgctggcaccgggttcgaaagtcgtttctgattatctggcaaaagcgaaactgacaccgtatctcgacgaactggggtttaaccttgtgggatacggttgtaccacctgtattggtaactctgggccgctgcccgatcctatcgaaacggcaatcaaaaaaggcgatttaaccgtcggtgcggtgctgtccggcaaccgtaactttgaaggccgtatccatccgctggttaaaactaactggctggcctcgccgccgctggtggttgcctatgcgctggcgggaaatatgaatatcaacctggcttctgagcctatcggccatgatcgcaaaggcgatccggtttatctgaaagatatctggccatcggcacaagaaattgcccgtgcggtagaacaagtctccacagaaatgttccgcaaagagtacgcagaagtttttgaaggcacagcagagtggaagggaattaacgtcacacgatccgatacctacggttggcaggaggactcaacctatattcgcttatcgcctttctttgatgaaatgcaggcaacaccagcaccagtggaagatattcacggtgcgcggatcctcgcaatgctgggggattcagtcaccactgaccatatctctccggcgggcagtattaagcccgacagcccagcgggtcgatatctacaaggtcggggtgttgagcgaaaagactttaactcctacggttcgcggcgtggtaaccatgaagtgatgatgcgcggcaccttcgccaatattcgcatccgtaatgaaatggtgcctggcgttgaaggggggatgacgcggcatttacctgacagcgacgtagtctctatttatgatgctgcgatgcgctataagcaggagcaaacgccgctggcggtgattgccgggaaagagtatggatcaggctccagtcgtgactgggcggcaaaaggtccgcgtctgcttggtattcgtgtggtgattgccgaatcgtttgaacgaattcaccgttcgaatttaattggcatgggcatcctgccgctggaatttccgcaaggcgtaacgcgtaaaacgttagggctaaccggggaagagaagattgatattggcgatctgcaaaacctacaacccggcgcgacggttccggtgacgcttacgcgcgcggatggtagccaggaagtcgtaccctgccgttgtcgtatcgacaccgcgacggagttgacctactaccagaacgacggcattttgcattatgtcattcgtaatatgttgaagtaacaactatttgcttgccggttattttgcttccggcaagcaaatgaattacacaatgcaagagggttatttgttcagcaaatggcccattttctcggctttggtatcgagataatgttcgttattggggttacgacctacaatcaatggtacgcgttcaacaatattaatccctgcttcggtcagaatttcgacttttttcgggttattggttaacaagcggacttcattgacgccaaggagtttgaacatatcagcgcaaagagtgaagtcgcgctcatcagcggcgaagcctaactggtggttagcctctacggtatcgtaaccttgatcctgcagtgcgtaagcgcggattttattcagcagaccaatgttacgaccttcctgacggtgatacagcaaaataccacggccttcctcggcaatttgcgtcaatgccgcttcgagctggaagccacaatcgcagcgcaagctgaacagggcgtcaccggtcagacattcggaatggacgcgcgcaagtaccggggtatgcccggaaatatcgccatagactagcgcgacatgatcgtgtccggttgccagttcttcaaatcccaccatcaggaaatcgccccatggggttggcagtttggcttctgccacacgtttaagctgcatgaaattctccagataatgctggttctgtattggcttattttgccataacgagaaggggttcacctaatcacgacgcgtcgatcgttcacggaatggcacaaatctgtcaatttttcctggaactgacgttttcagttatgattgtgggacttatcaaaaaggagaggccatgcgttcgattgccagacgtaccgcagtgggagctgcactattgcttgtcatgccagtagccgtatggatttctggctggcgttggcaacctggagaacaaagttggctactaaaagcggctttttgggttactgaaactgtcacccagccctggggcgtcattacacatttgattttattcggctggtttctctggtgtctgcgttttcgcattaaggctgcctttgtattatttgccattctggcggccgcaatccttgtgggacaaggcgttaaatcctggatcaaagacaaagtccaggaaccacgaccttttgttatctggctggaaaaaacacatcatattccggttgatgagttctacactttaaagcgagcagaacgcggaaatctagtgaaagaacagttggctgaagagaaaaatatcccacaatatttgcgttcacactggcagaaagagacggggtttgcctttccttccggtcacacgatgtttgctgccagttgggcactgctggccgttggtttgctgtggccgcgtcggcgaacgttaaccattgctatcttgctggtctgggcaacgggagtcatgggaagccgcctgctgctcgggatgcattggccacgcgatctggtagtagctacgttgatttcgtgggcgctggtggcggtggcaacgtggcttgcgcaacgaatttgtgggccattaacaccacctgcggaagaaaatcgcgaaatagcgcaacgagaacaagaaagttaacgctggttgattttccgaatttagcccttaaatcatcaacaatgcgtgtggatgccatttcgcagacggcgcgaaaatggtactttaaagggctattgcggtaagttgaccataatttattcgctctaaccacataacgggaagtaatgtgaaatatttactcattttcttactggtgttagcgatcttcgtgatttcggtcacgttgggtgcgcagaacgatcaacaggtgacgtttaattatctgttagcgcaaggggagtaccgtatttccacattgctggcggtattgtttgctgcggggtttgctatcggttggttgatttgtggcctgttctggctgcgagttcgtgtttccctggcgcgcgctgaacgtaaaataaagcgactggaaaaccagctttcacccgcgactgacgtggctgtagtgccgcactcgtcagcggcgaaggaataactttctatgctggagttgttgtttctgcttttgcctgtagccgctgcctatggctggtatatgggccgcagaagtgcgcaacaaaacaagcaagatgaagccaaccgcttgtcgcgtgattacgtagcgggggttaacttcctgcttagtaatcaacaggataaagcggtagacctgtttctcgatatgcttaaagaggatacaggcaccgttgaagcccaccttacgctcggaaacctgttccgttcgcgtggcgaagttgatcgcgctattcgcatccatcagaccctaatggaaagcgcctcgctgacctatgaacagcgtctgttggcgattcaacaactggggcgtgattacatggccgccgggttatatgaccgcgcggaagacatgttcaatcagctgaccgatgaaactgacttccgcattggcgcgctgcaacagttgctacaaatctaccaggctaccagtgagtggcagaaagcaattgatgttgccgaacgcctggtgaagctgggtaaagataaacagcgcgtcgaaattgcccatttctactgtgagttagccctgcagcatatggccagcgacgatctcgatcgtgccatgaccttgctaaaaaaaggggcggcggcagataaaaacagcgcccgcgtatccataatgatgggacgcgtgtttatggcgaaaggagaatacgccaaagccgtcgaaagtctgcaacgcgtgatatcccaggacagagaactggtcagcgaaacgctggaaatgttgcaaacctgctatcagcagttgggtaaaactgccgaatgggcagaattcctgcagcgtgcggtggaagagaacaccggtgccgatgctgaattgatgcttgctgatatcatcgaagcgcgcgacggtagtgaggccgcacaggtctatattacgcgccagcttcagcgtcatccgaccatgcgtgtgttccataagttaatggattaccacttaaatgaagcggaagaagggcgtgccaaagagagcctgatggtgctgcgtgacatggttggcgagaaggtacgtagtaagcctcgttatcgttgccagaaatgtggttttaccgcatacaccctctactggcattgtccgtcttgtcgggcctggtcaaccattaaaccgattcgcggtcttgatggcctgtaatttttaaaaaaaatccgactttagttacaacatactaattattaatgttccattgtgctccggcaacgacggcgcagaaaaagcctgccaggggagaaatcgcaactgttaattttttatttccacgggtagaatgctcgccgtttacctgtttcgcgccacttccggtgcccatcatcaagaaggtctggtcatgacgttaactgcttcatcttcttcccgcgctgttacgaattctcctgtggttgttgcccttgattatcataatcgtgatgacgcgctggcctttgtcgacaagatcgacccacgcgattgtcgtctgaaggtcggcaaagagatgtttacattgtttgggccacagtttgtgcgcgaacttcaacagcgtggttttgatatctttcttgacctgaaattccacgatatccccaacactgcagcgcacgctgtcgctgctgcagctgacttaggcgtgtggatggtgaatgttcatgcctctggtggggcgcgtatgatgaccgcagcgcgtgaggcactggttccgtttggcaaagatgcaccgcttttgattgctgtgacagtgttgaccagcatggaagccagcgacctggtcgatcttggcatgacactgtcacctgcagattatgcagaacgtctggcggcactgacgcaaaaatgtggccttgatggtgtggtgtgttctgctcaggaagctgtgcgctttaaacaggtattcggtcaggagttcaaactggttacgccgggcattcgtccgcaggggagtgaagctggtgaccagcgccgcattatgacgccagaacaggcgttgtcggctggtgttgattatatggtgattggtcgcccggtaacgcaatcggtagatccagcgcagacgctgaaagcgatcaacgcctctttacagcggagtgcatgatgagtgattccaacagccgtctggtctactcaacggaaaccggacgtattgatgagcccaaagcggcccctgtacgccctaaaggcgacggtgtggtgcgtattcagcgtcagaccagtggacgtaaaggtaagggcgtttgcctgattaccggtgtcgatctcgatgatgccgaactgacaaaacttgcagcggaactgaagaaaaaatgcggctgcggcggagcagttaaagatggagttattgaaatccagggcgataagcgtgatttattaaaatcactacttgaagcgaaagggatgaaggtaaaactcgcaggcggttaacataaaaagccacggatatatccgtggctttcgaatattttactgtgcgtattattcagttatttcgtactgaacagaatcaagcgtattataattgcgagtcgataatcgacatttatttacgattatttaccgacctggtgaccaataacaccaccgacagctgcaccacctaatgtacccaacgtactgccatcggtcagtactgcaccgcctaatgcccctgcacccgcgccgattgcggtgttgcggtcccgtttagaccagttagaacaggcactcagagacattgccaaagtaattgccagaacagccgcggtcatttttttgctcgttacaaacataatactctctcctgaatttatgattcacggaagtaagctctctataactataatagctaagaataagcctggtgaaattattccgtgaaatctgctcgcgcgcagggttatatcacgcaggtgataatgacttcctgttatatcgctgataataattttatatcttgagagtgttaataacaggtaaatagtcttaattatcaaccaggaatcatcttagagcggatgatttgccaaactgcaaatcatccgtagagaagggaaatggttaaatgtcaacgacgtgaacggtgagtttactgtgctcaagatgcatcagatcgctggcgcgtattttcgaatcggtaatcacgcgattgaatcgctcaacgggaccgatggagtatgaatgtacagcaccaaatttcgagctgtcagtcaggactatcgcttcgcactctttttccagcacggcattgaccacatcggtacgcatcatatcgcgaccggtaaatccagtttcaggttgccagccatcaataccaataaatgctttgctgaaatgcacctgttggatgcactggcgtgtcaaagggccaaccatactttcgctttttttctgatacacgccaccgagcaaaataacttcacaaggcgcgtctttcagcaaatgcgcgatgtagctgctgaccgtgatgatagtgacatttttcttctgctcgcccagagtccgggcgagtagggcattgctgctgccattttcgataaagatggtttcgcccggttgaaccagcgacgcggcaaactcggcgagttcacgcttcagcgtatagttgctcatcatacgggtttcgacgtcatcactatcaagcgaaacagcaaagccatgtgcacggcggaggtaactcagtttttcgagtgtgttgagatcctggcgaatggtaacttcagaaactccagtggcttttgccagatcggttacgctaacctgaccctggtcaatgaccatctgtagaatagtttgttgtcgggaattcatcgctgtaattcttataacgttataatacttaataaaaaaatactgacgcgccgggcatcctcaaataggaaaacctgaaggcacgattgttaaatctcccacggtgccttcgggatgtctggcgtagattcagcaacctggcgcaagagttctgctttaagtatctcgagattatggatcgcagagtggtaatcgcctgccacaaggatatctaacacaatatcaatacgttcggcaacgcgctgggcatcaaattcagacatcaagggcatccttatagcaaaagggggaaaatgaataatgcaaaaattgccgctaaaagagaagtgtttaacagcaacggctaattatcatccaggaatacgatatataatgacgggatatagcgctaagtatatatattcatctacttatgcgcgcttcagatagcgtttataccagcgttcgaaggcgacggcgggcatcggtttggcaaacaaaaatccttgccgctcattgatcccgttcttggttaaaaaagcatcttcctttgcactctctacaccttcggcgatcacctgaagattcaatgcctgggccacagcgacgatcgcccggaccagtgactgcgagacaggttgtttgtgaatatctcgaacaaaaacctggtcaagtttgatggcatcgatcggaaagcgcgccagttgcgaaagtgaagagtagccggtaccaaaatcatccagatgcacttgcgcacctagttggctaaattgttgaataacagacagtgccagttcatcattctcaatcagacaactctctgtcagttcaacatctatagggcagtattcaaaattgagttcctggagaacctgtttcagggcggtgaaaatggtttgatcggcgagctgacgtgcagaaatatttaccgccactcgcaggtttatgcctttatcccgccactttgccacctggcgtacgacatcgagaatcacccaacggcctaaaggcacaattagccctgactcttcggcgtaggaaatgaagtccaacggtggaatcaacccacgttcaggtgactgccaacgtactagtgcttccagactgcgcacttcgccacgccaggtgattttcggttgatagtgaataaccaactgatcgttttccagtgctttacgcaagttggtatccagccagagatattcaaatacccgttgattcatttctggggtaaaaacgcaaaattgtcctcgtccgccttccttcgctgtgtacattgctgtgtcggcgtgacgaataatagccgtgctgtctgaaccatgttcgggagagagtgcaatacctactgaacagctggtataaacttcaattaaaccaatgcgaaaggggagccgtaagcgggtcaaaattcgtgatgccattgcttccagcgcgctttgtgaggtgttggatgccagtaccagaaactcatccccacctggacgcgccaacacctggtcatgttcgagacagcttaaaatagccaatgacacgtcgcgtaataactggtcaccaaacaaatgcccataggcgtcgttgacctttttgaaattatccaaatcaagatacacaaccccaactttattgttatctgcatgattaatagcgtgatcgattaaatcctgcattgcgttacgattcggcagtccggtgatactgtcggtatttgccagaatacgcagtcgctcctgagcgcggcgctcttcggtaatgtcggtgccggaacagattaaaaaaatctcgtttttgccactgccgctgtggacaaatttattgcgaaacagaaacagccgctggcctttacatgttggtatccacagttcgacttcatatgcattgccgcttcgaaaaaatacacggttattgcgcctggatgccgcagcttcacgacggctcataaacagtttaaacacgctttgcccaatgacgtcgtgttctttcaaccctgtgtaatcttcacataaccgattgaagcgttggatattcccccggctgtcgagaatcactattgcggaatgtgcttcagaaactacctgctcagcaaaggaaagcccgtgtgataaatcacgagcaaccgccggtgtgtcatgccatgcagacgcgttgccagcccattcccgtttattgatttttcgtcctaccagatgcacagaaagatcgctttcatcgacggtcagactcatcatcaggctggaggtgatgaccgtcatttccctgatgcgagcagcctgttcggcagataactgcaatgtacgatcaggttctgtggtttcggtggtagaaaagcgcaaaacatcgctgctttccgtcaaccgccagtatggattgtgcgatccgagaaagttgtacaacgttgtggactccctaatggttttcatgatgcatatcctccggttaacagcggagtccgcggttaaataaaaggaactacatgacttacatgaaattaacggcggctaaacgcattgttttttttatatatttatttgtaatccagttttggaaaaacgccagttttcaaacgaaagtcagttaaaaaatctgcctggatataacgaaggtagagcggggaaataaacggcccatccatgaggaatgggccgtgaaaggagattacgcgaccgggcgcgcaataatgctgcgggtttccatgcggacttcggcaatagtgacgtcaataacgtcagtcactttgtaaaccgtttcacctttaatttgtacagtgccgttttcctggctgcaaaccagttcatcgcgcacagcgtgtaagaaaggtgccggaataaaggcgatagcgccgttatcaaccaaacgaacacgcatgccgccacggctgatatcgacaatttccgctgcgaaacgggtgtcggtcccggctttgtctttcaggaagcgtgcgtataaccagtcaccaacatcacgttctgccatccggttgagacggcgacgctcggccatttggacagtgatttcatcctgtgggcgcgtcgcagtttcgcctttgataaccgctttcagcagacggtggttgatcatgtcgccatatttacggatcggcgaagtccaggtggcgtatgcttccagaccgaggccaaagtgaggaccgggttcagtgctaatttcagcaaatgactggaagcgacgaatgcggctgtcgaggaaaccagttggttgcgcgtccagttcacgacgcagtttgcagaaaccgtccagcgtgagcacttcttcggcatcgacatgcagaccgtgcgttttcagcaacgctgccagcgcgtcggcattcgccggatcaaagcccatatgcacgttatagatgccaaaaccgagcttatcgcgcagtacgcgggccgcacaaatgttagcggcaatcatcgcttcttcgacgatacggttggcaatgcgacgaggctcggcgacgatatccagcacttcacctttttcaccgagaataaagcggtaatccgggcgatctttaaacaccagtgcgtggttatgacgccactcgccgcggcgttggcaaatttgcgctagcaaacggacttgttcggcaattgcttcactttcaggctgccagtcaccggtattttccagccagtcagaaacctggtcatacaccagctttgctttggattcgatggtggcggcaaagaattcgatattatcttcaatggtgccatcagcggagagcgtcatgcggcatgccagtaccgggcggacttcattggcgcgcagtgagcagagatcgtcagaaagctcgcgaggaagcatagggatgttgaagccaggcagatagttggtgaatgcgcgaattttcgcggctttgtccagcttgctgccttcagcaatccacgcggttggatcggcaatcgccacaatcagctgaagtttgtcatccggcaacgccttagcgaaaagggcgtcatccatatcttctgtgctggcactgtcgatggtgacaaaatccagcgcggtcagatcttcacgaaccagaccttcatcgagcatttcggtagcgacgccgtctggtgcttctttttccagattatggcgcgcaagtgtaacccaccacggtacaaagtggtcgtcaccaaaagtgatgtattgtgtcagttcagcatagaaagaacgatcgcctttcagcggatgacggcgcatttcggcaaccgcccagtcgccttctttaaactcgtggttcaggccacgggctgcgcggcaaggaatggcgtcttttaagagtggatgatcaggaacgatggccagacggtcatttttgccctgaactttacccacgaaacgagtcaggaacggttcaaccagttcttctggctctgcggattcacgttctttttcactgtggatcaccgcgataattcggtcgccatgcatgacttttttcatctgcggcggcggaatgaaataacttttttgcgcgtcgacttccaggaagccaaagcctttttctgtggcttttaccaccccttcagcgcgtggcgtctgggaatgcagttgctgtttaagctgcgctagcagcgggttgtcctgaaacataattgtctattttggtggccattagagcggctgacagttttacgcgaatctgtctgacgcggcaaggttaatatgtctcacccaacgcgatttttaagcgatttatccagccacacagcccgctccataccagcagattaataatctgcgttgatgatttttcgtgttcgagtaaagggctgaactgggcggcgctaaagcgatcgggtgctcgggtcagccattgtatcgcctgaacggtagcgcgctcaacagaatgacggtcagcccattggttaatttcattttcgcccttgcgcagaagggggctgatttttttatattcatttgatgaatccatacaggcggcaaaacaagcaggactgccatttatacgcgcgcataacaacgccgcaagctgattatccggctgtgtattgacccgtgtgctgtttaacaacttttcgagaagggaaagtgaaatagggtggagagagagtatttcggccagttggcaaagttctgcagttgaactttttgtgtgctcttcaggtagtttttccacctcatagctgcttcgccagcgtaatgattcatcagcaaactgtgacgcgtcggcgtagttttgtatctccagcccgggtaaccagcgtaccggatgcccgagataagcctgaaatgtcgcaattgtccgcgcctgaaagccaataaaaccaatgatttggttaatgatcacacagtcccagacagtaagaccgacgtcattcagatgctggcgcgatcggttgtcgataatagaaggcgagctagccagttggcgggcatattgcgtgatttgtgccaaccgatgattactttccctggaggaatcaggcccggggagcggcgtaagtcgcgccgaatagtagttacataaccgctggacgccgcaaacctgagcaaccgtcagggccgtcgacaagcgttcataagcggtgaaggtctgtgaacgggtcacggtaagctggtcagggaacaactctactgcaagaacgcgcgcagggaccagccatgaaaggaagggtgccagcgtttcttcatcaaggatcacgtcgagcagaaagggatcgctgacctttgcggcttccgggaccagaggcagaacgtcatactccgcagtactggattgcgtttcatgataccagtggcttttgccggtgatgtggcgttgttccatgggcgctccttggtcgtaaaggaaatcgttatcctgacgcaaggcgggaaggggagaaagacggatcggcgataacaaatatcagaaaggtataacagagataacgggcggcagaatgccgcccatctttaccaacagaacaattatttcagttcgagttcgttcattgcagcgatgctgaaaccgccgtcaacgtggaccacttcaccggagataccggcagagagatcggagcacaggaatgccgcagagttacccacatcttcaatagtaacggtacggcgaatcggggtaacggcttcgcaatgagccagcattttgcggaagtctttgataccggaagccgccagagtacggatcggaccagcagagatggcgttaacacgcacaccttccggacccatcgcgttcgccatatagcgcacgttcgcttccagagacgcttttgccagacccataacgttgtagttcgggatagcgcgctcagcgccaaggtaggaaagggtcagcagggcagaacccggattcagcatggagcggcaagcttttgccattgcaacgaagctgtaggagctgatgtcgtgagcaattttgaagccttcacgggtaacggcgttaacatagtcaccatccagctgatcgccaggtgcaaaaccaatagagtgtacgaaaccgtcaaatttcggccaaactttccccagttcagcgaacatggtgtcgatgctggcatcttcggcaacatcgcactgcagaacgatgtcagaacccaattgagcggcaaattcttctacgcggcctttcagtttgtcgttctggtaggtgaatgccagttcagctccttcgcggtgcatcgcctgagcgataccgtaggcgatggacagtttgctggcaacaccggttaccagaatgcgcttaccggaaagaaaacccatagctttaatccttattgttgatgcttgttgtgcctgaaaatcaggcgattcgtcgttttagtaaacagtacgaacagataaacggttattataatcaacctggctgtgggtggctatagttgccaggtccgaccggagcagggcgcgggcagggtgggcgctttttccctcaccctaatcctctccacagaggggcagggggaccgtattgtgcaaatattgtcaccccagcaacaaacaggcttatacagccccctaaccctttcagggcgatggctgggacggttcagaccttgccgaatactctccagaactgtcatcatattttcaccacaacagctattcggctcggtcggccccctcgccctttcagggtgagggtgaccggcggttcagttcctgcagaataatctccaacaccgccacctcattacaatcaatctcgttattccagaaacgcagcacggtccagccctgcgactcaagccagttagtgcgcctggaatcataggcaactgccaaatcatgctgcccaccatccagctcaacgactacacgcgccgagcagcaagcaaaatcgagaatgtagctccccaccggatgttgacggcgaaatttgaaatcaccaaaacgtcggctgcgaagatatcgccagagctttcgttcctgcaaagtgagattgcgtcttaaatcacgcgcatttgattttattttatccatcacctcattctgacaagatttaatctcttgtcagaatgaggtgaataatctggaaggaggattcagaaaattagcgatctttacgccacgcatccgccgtcaatgcttcgccaaagtgcccggcaatcagccgtttggtgagttcatgcagcggcgatgccagcacatccgcggtgctgcctcgctcgacaacctcgccctgatgcatcaccagcacctggtcgctaatgtgcttcatcattccgatatgctgggtgacataaatatacgaaatgccctgtttttcctgtaattccagcatcagattaatcaactgcgaacgcatcgacatatccagtgaagcgagggcttcatcggcaataatgacttttgggcgcaatatcagcgcgcgcgccagacccagacgctgtttttgcccgggggccaacatatgcggatagtaactgacgtgatccggtagcagcccaaccatacgcatcgtttcaataatctgtttgcgacgctgttccggttccaggttggtgttcaggcgcagtggaaaatccagaatttgcgagatacgttgacggggattcaacgaggtcgaaggatcctgaaaaatcatgcgaatacgctgactgcggaaggaataatcgccaaaatgcagtggatgatcgtcaatcaataactcgccgctggtaggttctatcattcccgccagcatttttgccagcgtggatttacccgaaccattctcgccgataatcgccagtgtctggccttcacgtagcgtaaagctcaagggttttaccgcttctacggtttgacgacgaaaccagccggtccggtagcggaacgttttacttaaattacgcacttcaagcagcgtttcgatcatctcactctttctccatgttcagcgggaaatgacaggcatagagatgatttttcgcccccgtcaaacgtggcgtcacaatgcattctcgttgtgcatacgggcaacgtggccccagacgacaaccaatcggtaactgttccagcagtgggatagcgccgggcagcgtattgaggcgacttttatgcggcatcgcgctgccgaagtctggtatcgcgcggatcagcgcctgggtataaggatgatgtggcatcgtcaccaactccttactcggcgcggtttccaccgtttgaccgcagtaaagtacgttaattttatccgcccattggctaagcatttgtaagtcatggctgataagcaaaatagtggtattgctgttttggttgagacgcgtcagcaggcgaaagatttgcgcctgggttgttggctccattgagtttgtcggttcgtcagcaatcagcagacgcggttgattcgccagtgcaatggctatcatcactttctgacattcaccttcggtcaactcatagggaaaactgcgcatcgcatctttgtgatctttaatccccacgcggtgcagcagttcaatggcacggcgtttgcgccagccaaaacgctgccaccaacggcctttataggtccaggctgggatgttttgcatcaactggcgacccacacgttctgaaggatctagacacgactgcggttcctggaaaatcatcgacacgttgtggccaaccagtttgcgccgttcgcgtgcggagagacgcagcaaatcgatatcatcaaaacgcatacggtcagcagtaacacgccagttatctttattcaccccacaaatcgctttcgcaatcaaactcttgccggaaccggattcaccaacaagaccgcggatttcaccttcggttaaggtcatacttacccggtcaacggctttaacccactcatccccggttttaaattcaatagtcaggttacgaatatcgagtaatggcattattccacccccgcaataatcgcacgacgaacgccatcgccaaggaggttaaccaacagcacgctaatcataattgccgcacctggcagcatgacagtccacggggcgacataaatcagttccagcgcatcaccgagcatcgctccccattcaggcgaggggagttgtgcgccgagatcgagaaagcccagcgcggcgatatcgagaattgccatcgacagtgcgcgggtgatctcggtgaccagcccggcggtgatgttaggcatcacagcaaaccagagaatattcagcgttgatgcgccatccagacgggcggcgataacgtactctttttccagttcgtcatgcaccatgctgtaaatcgaacgtaccatacgcggcagcagcgccagccagacggcaaacatggcgtgagacaaactcggtccggcaaacgctacaacgataattgccagcagcagcgaagggatcgccagtaaggtatccagaatatggttaagcaccgctgagcggaggccgtgcgtcgccccggcgaaggtgcccagtaccaggccacagatcgtcgcggcaagcgtcaccacaaatgcgccacccacggttggcgcagctccgctcagtaaacggcttaaaacatcgcgtccgaggtcgtcagtccccaggaagaaagaaacttcgccatagcgcgaccatgacggcggcaataattggtaaccgagaaattgctggtcgatgccgtaaggcgcaaaccagccgccaaaaatacacagtacagccagccccgcgcagccgtacaggccgaccatcgcagaggcgtcactataaaatttgcgccaggcggtacgcagcgtgcccggcgggcgcttttcgctgtatacgctatcgtaaggcataccattccttatgtttcagagggttagccatggcacccaaaatatcagaaatcacgttaacaataatgaccagtgagccacacaccatcactccggcggaaatggctgcgtaatcctgctggcggatggcgttaattaaccagcgccctaaacccggccagctaaaaaccatttcggtgatcatcgccagcgtcagcatggtggaaaactgtaagcccaggcgaggaataaccggcggtaacgcgttatgcagaacgtggcgacgcaaaatagtaaagcgcgacaaaccgcgggtcgccgccgcttttacatagttctggtcatacacttcaatagtgctgatacgcatcaggcggatcacttcagttgttggcgcaaccgacagggtgatcacgggcaatatcatatggcggattgcgctcatgatcatttcatcccgccatggtgagtccgaaagccaggcatcaatcaacgcaaaaccggtaatcggtttcacttcgtagagcagatcgaaacgccctgaaacgggcaaccaacctagcgtgagtgaacaaaacagcgtcaacagaagcgccagccagaacaccgggattgaaaagcccagtaaggcgatggcgttgatcaagttatcctgccacttatggcgcgtaatcccggcaatcatccccacggggatgccaacaatcagcgcaaaaccgaaggcgaggatgcacagttccatcgtcgccgggaagacctcttttaactgttcggcaatcggttgaccgttaatgctggaaacaccaaaatcccagtggatcaggccgttaaaccagaacacccaggcattccacagtgacgcgccttgtaacggcgcatgaggggtgaaatagctcaagctgaagccaacgaaggtcagcaggaacaaggtgacaatcaataacaaaatgcggcgtaaggtgaagataatcatggttttttcacctcatcctgtttctcgcgatacaccccagcaaaggaggcgttaccaaacgggctaagtaccagacctttgatatcgtaccgataggcctgcaaacgcaatgacgacgccagcggcaaaatgggcaattcctgcgccagaatactctgcgcttcgtcataggcttcaatacgcgccgccagctgctgcgaagagagcgccttacgcaatacgctgtcgaatttcggatcgcaccagtgggcgaggttggtctgcgaatgaattgccgcgcagctcagtaacggacggaagaaactgtccgggtcgttactgtccgtcgcccaaccggataacgtcagatcatggctcatatccatcaaccgcgcctcctgaaagcgaccttctaccggcacaatcaccacttttacgccaacctgcgccatatccgcctgaatcagttcggcagttttcagtggactggggttccacgcctgcgaacgtgtgggcacccacagtttcagcgttaaattttccagccccaacgacttcaactgttcgcgcgatttcgccggattgtattcagtaattttagcctcgttgtcataggcccacgaggcgcgcggtaaaatagaggccgccgtttcagccgtaccataatagatggattgcatcaggcgctggttattaatcgccagtgccagcgcatggcggacagcgggattatttagcggcggtttggcggtgttaaatgccagataggcgacgttcatcccaggacgcagcgttaaacgcaagcgcgggtcgtcacgcaaaatggatagctggctggcagcaggccaggccagaacgtcgcattccccggtcaggagtttcgacagacgtccggtgccgccggagcctaaatccaccactacctgcggcattaacggtttaccgcgccagaagtcatcatgacgttgtaggcgaataaattgcccggcgcggtattccgacaactgatacggaccggtgccgaccggttgacggtcgagttgctcctggcgatcttctttctctaacttccgggcatattctgccgacatgaccgaagcataatgggttgcgaggtgccacaaaaaagaagcatccggctgggcgagtcggaactcaacggtatgattatccagtttgcggacgcttttcacgttatcggcaaattgcaggctgtcgaagtaggggaagttgctgccgttgacgttatgccacgggttgttgcggtcaaaaattcgctggaaggtaaacaccacatcgtcggcattcattttacgagtgggagtaaaccagtcggttttttgaaacggaacatcgcgacgcaggtggaagcgataggtcgcgccgttgtcgagtacttcccagctttcggcaagttccggcatcaggcgataggtatagggatcgacatccagcagtcgatcataaaactgggcggcaagggtatcgacaattaacccactgctcgctttggatgggttaaaggtgttgacttgcccgctgacgcaatagacaaaaccgctgtcgcggatatcagcatgcgggggggattcaggcgcggcgattgcctgaccactcacaagtccagcaatcaccaaaagagacgataatacctggcgcataatattaagggattttatgtaaagaggctatcttactaatatttaatgacatttgccattaccgtttgtgttcaggggtcgtaatgagggccgtgtggttggtcgttgaacaggtggcgtcgccatctgttcaacattcgtacccgtgatttctctataactataactcacagaacaacttagcgaggagcagagcggtacgatcgtgagaaacccattaaagcacgctgcagtgcgtgtcattgttagccggatgcggcgtgaacgctttatccggacaacgatattgaccgatcgtctgcaattaaataattactcattaccccattgattcaaaaactctgcgatctcatcaatgcgtacgggattaatccccgcttcagcagccatttcatgttgggcttcttcgctgatctcttcattgttcatcaaacgggtgagcagtaactggaagtagtgggccagcggtgtgcgttcagcctctgcgacaggctctgcgcattcggtcgcgtactcatcggcaatatcaaaatattttagcgggatatcgtggttcattatttgcccctggggttaatgcgctaagcataagggcggatgatagcactcgtgatccgggtcatacatctttttatagttaatggcgcggcgcgttaccctcaggcaggataatgcgccgcgcatccgactattacgtttcactcaccggcgttctgtcaccatcatacaacggcactttgcgatagcggcggatcagataccataaatatgcgccgcctaacgaagcccataccagaccgagtgtcagtgacgttgactcgaggttaacccacagcacacccaccgtcagcgcgccaaccagcggcatcagcaaatagtggaagtgatccttccagcttttattcattcctttacgccgccagaaatgattaaacaccgacagattcacgaaggtaaacgccaccagagcaccgaagttaattaacgctgtggcggtaactaaatcgaagaacagcgccgacaacgcgacaatcccgaccataatgacgttgagtgccggagtccgccattttgggtgcacatagccaaacacgcgctccggaaacacattgtcacgccccatcacatacagcagacgcgacacgctggcatgtgaagccaggccagaggctaacgtgttcacaaacgtggtgcagaggaaaatcgactggaagagcttgccgccgacgtacagcgcaatttcaggcagtgcggcatccggatctttaaagcggctgatatcgggaaagaacagctgcataaagaacgacgccgcgataaagataacgccaccgtagaccgccgtcaggaagatggctttcgggatcacgcgtgcggcgtccggcgtctcttccgaaagcgtggtcaccgcatcgaaaccgaggaaggagaaacagacaatcgtcgccccggtaataatcgggatcaggtgcgcgttctcgctgataaacggctgaagtgaccagacggtgccaacgccttctcctttatgcagtccctgaactaccaggaagataaacaccaccatgatggagatttgcaccagtacaaacagggtattgaagttagcgaccaggttgacgctcttcagattcgcggcggttaaaatggcgacgaaggttaccacccacacccacggcggcacttccgggaagagggcggagagatagattttcgccaacaagacgttaatcatcggcaaaaagagataatccagcagcgatgaccagccgaccataaatccgacgtgcgggttaatcgacttttgcgcgtaggtataggccgaaccggcctccggaaactggcgaaccagtttgccgtagctgatagcggtaaacagcacacccgccagcgccagcaaataggacgccggaacgtgaccgtcgctaatgccggagacaataccaaaagtatcaaatacggtcatcggcgtgagataggccagacccatcatcaccacctgccacaatttcagtgattttcgcagacgggttttgccgggttgcgcagcaatattcagtggtgaattaatagccataattgctgcctcccctgcgtaataaggtttgcggtcgtgtcgacctgaaatcaaacctgtttagcaagggaagcaaagggggcggagtccagtcagtcgcaggaggggcgcatacgcagcctccctcgccatgcggggatttaatcatcggcatcatctcatttcctcgtcacagtcttaatcgttaacggaagcccgttgccgcctgcgctccataacgcgacatccggaaaatgtctggattaccagcaaatgtcaggcctggctccgctcaggccgatgaaacaaccccgcaaggggtattacgcgtttttcaacatccactcaatttctgtttctgtgatgaggcgctcaaactgcaacagctcatcatttttacaggcgtgatagacatggcaaaaccgttcgcctaaatagcggcgcaggtgatcattctcgataaactcacccagggcatcgctctggcgaatcgggaagggtaagccatcctgttccagcccgttgccttcgacttcttcctgcaacggcagctcgttatcaagaccgtgcaaaataccggcaaaaatcgctgccatcaccagatatgggttggcatcggcacccgccacgcgatattccacgcggtgattatgacggtcgccgcacggaatacgcagggcgacggtgcggttgttatggccccacgacgcctgcgtcggcacatacattcccggctggaagcggcgatacgagttcacgtttggtgccagcaacgccatcgacgacggcatcaggtcaatcatcccggcgagcatctttttcagcagcggcgaatcttcgccttccgcgtcagaaagcacgttctcgccacgattattttgcatactgatatggatatgcattccgctgcccgcgtgctcttcatacggcttcgccataaaagtggcgtgcatcttatgcttttctgccatcagacgcaccaggcgttttagtgccagcgcatcatcgcaggcttccagcacgttatcagtatggtaaaggttgatttcaaactgacccggcgaggcctcagcgaccgcgccatctgccggaatcagctgtaactgcgccagttcatcaatatcattgagcacgtcggcgaagtggttgaggttatcaacggagtaaacctggctttgtgtattgcggtcatcggtgccaggcgcgcagggcggttgcagatacccttcagcgtcgcgctggcgatccagtaaatagaactccagctctaccgctacgaccgggaacaatccgcgctggcgcagctgctgccacaggcggttaagaacgttccgcggctcaacgtcaaagggagcgcctcttcatcgaccatggtcaggagcatctgaccgataaactctggatcggcggcagaaggagttaaggaaccgagaacaggaacacaggtacgatccggctcgcccatttcctgacccagacctgcttcttctactacgttgcccagaatatccattgcaaataccgaggccgggaaataacaccctttctcgagcttcttcaggcttgaaacaggaatacgctttccacggaagcaaccatttaaatcggtaagtaaaacatcaacatattgcgtattcgggtagcgctccaggtagcgtttcacttcctgcgtaaaggcgctaccccgcctctcttctgactgctgaacaaagttctctacttcaacgatattggtttccatgattcttcgcctttggtttgttttccgctcgttatcaaagcgtaaaatataatgaccaccattcgaatctgtatgcaaactaaatgtttgtcaaatgttaaattgagtttgcaaaaatgaaaacccactgctagattgaaaaaatattgaacataaaggtcatttaaagcgcagtaatggcgataatttagtccactttgtgagattgagcatggaaaatataatgaacaatccggttatcggtgtcgtaatgtgcaggaacaggcttaagggtcatgcgacccagactctgcaagaaaagtacctgaatgccatcatccatgcaggcggcttgcctattgcgctaccacatgcgctggcggaaccgtcattacttgaacaacttttgccgaaactcgatggcatttatcttcctggtagtcccagcaatgtgcagccgcacctatatggtgaaaacggcgatgagcctgacgccgatcccgggcgtgatcttctgagcatggcgataattaatgccgcactcgaaaggcgcatcccattttcgccatctgccggggtttacaagaactggtggtggcaaccggtggttcgttgcatcgcaagctgtgcgaacagcctgaattgctggaacatcgggaagatcccgaactgccggtggaacagcaatatgcaccgtcgcatgaagttcaggttgaagaggggggattactgtctgcgttgttacctgaatgtagcaacttttgggtaaactctctacatggacaaggggcgaaggtcgttagcccacggttgcgtgttgaagctcgctcgccggatggcttagttgaggcggttagcgtcatcaatcatccttttgcgctgggcgtacagtggcacccggaatggaacagtagcgagtacgcgctttcgcgtatattgttcgagggctttatcaccgcttgtcagcaccatatcgctgaaaaacagcgactctgaccactacagtttaaggaaatgcaaatatgagtgatgagggactggcgccaggaaaacgcttgtcggaaatccgccagcagcaggggctttcacaacgtcgtgccgccgaactctccgggctgactcacagtgctatcagtacgatagaacaagataaagtcagccctgccatcagtacgctgcaaaagctgctgaaggtgtatggtctgtcactctcggaattcttttccgagccggaaaaacctgatgagccgcaggtcgtcattaatcaggacgacttaattgagatgggtagtcagggtgtgtcaatgaagctggttcataacggtaacccgaatcgcacgctggcgatgatctttgaaacgtaccagccgggcacaaccactggggaaagaattaagcatcagggtgaggaaataggcactgtactggaaggtgaaattgttctgacgattaatggtcaggattaccacctcgtcgcggggcaaagttatgccattaataccggcatcccgcacagtttcagtaatacgtcggcaggtatttgccgaattatcagcgcccatacgcccaccacgttttaatctttttgttctgtaagccgggtaagcgcaatgcgcccggcaatctatacacaaaatcattcaagttgcatcaaggcggcaagtgagcaaatcccgatgagcttactcaggtaagtgattcgggggagcgaacgcagccaaggcagaggcggcttgaaggatgaagtgtatataaagaatgtcgccagaaataaacgggcatacggcccggggatctctgcgccctgacgttcacaaactgcatatatctgatagacgtgaaacaggagtcataatgaattttcatcatctggcttactggcaggataaagcgttaagtctcgccattgaaaaccgcttatttattaacggtgaatatactgctgcggcggaaaatgaaacctttgaaaccgttgatccggtcacccaggcaccgctggcgaaaattgcccgcggcaagagcgtcgatatcgaccgtgcgatgagcgcagcacgcggcgtatttgaacgcggcgactggtcactctcttctccggctaaacgtaaagcggtactgaataaactcgccgatttaatggaagcccacgccgaagagctggcactgctggaaactctcgacaccggcaaaccgattcgtcacagtctgcgtgatgatattcccggcgcggcgcgcgccattcgctggtacgccgaagcgatcgacaaagtgtatggcgaagtggcgaccaccagtagccatgagctggcgatgatcgtgcgtgaaccggtcggcgtgattgccgccatcgtgccgtggaacttcccgctgttgctgacttgctggaaactcggcccggcgctggcggcgggaaacagcgtgattctaaaaccgtctgaaaaatcaccgctcagtgcgattcgtctcgcggggctggcgaaagaagcaggcttgccggatggtgtgttgaacgtggtgacgggttttggtcatgaagccgggcaggcgctgtcgcgtcataacgatatcgacgccattgcctttaccggttcaacccgtaccgggaaacagctgctgaaagatgcgggcgacagcaacatgaaacgcgtctggctggaagcgggcggcaaaagcgccaacatcgttttcgctgactgcccggatttgcaacaggcggcaagcgccaccgcagcaggcattttctacaaccagggacaggtgtgcatcgccggaacgcgcctgttgctggaagagagcatcgccgatgaattcttagccctgttaaaacagcaggcgcaaaactggcagccgggccatccacttgatcccgcaaccaccatgggcaccttaatcgactgcgcccacgccgactcggtccatagctttattcgggaaggcgaaagcaaagggcaactgttgttggatggccgtaacgccgggctggctgccgccatcggcccgaccatctttgtggatgtggacccgaatgcgtccttaagtcgcgaagagattttcggtccggtgctggtggtcacgcgtttcacatcagaagaacaggcgctacagcttgccaacgacagccagtacggccttggcgcggcggtatggacgcgcgacctctcccgcgcgcaccgcatgagccgacgcctgaaagccggttccgtcttcgtcaataactacaacgacggcgatatgaccgtgccgtttggcggctataagcagagcggcaacggtcgcgacaaatccctgcatgcccttgaaaaattcactgaactgaaaaccatctggataagcctggaggcctgaaatgaccgaacataccagcagttactacgccgccagtgcgaataaatatgcaccattcgacacgctgaatgagtcaatcacctgcgacgtttgcgtggttggcggcggctataccgggctctcctccgcgctgcatctggcggaagcgggctttgacgtagtggttctcgaagcctcacgcatcggctttggcgcaagcgggcgcaatggcggacagcttgtgaactcctacagccgcgacatcgacgtgatcgaaaaaagctacggcatggacaccgcccgtatgctcggcagcatgatgttcgaaggtggtgagatcatccgcgaacgtatcaaacgttatcagattgactgcgactaccgccccggcggcctgtttgtggcgatgaatgataaacagctcgccacacttgaagagcagaaagagaactgggaacgctacggcaataaacagctggaattgctggacgccaacgccattcgccgtgaagtagccagcgatcgctataccggtgcgctgctggatcacagcggtgggcatattcatccgctaaaccttgccattggcgaagcggacgccatccgcctcaacggcgggcgcgtgtatgaactttctgccgtgacgcagatccagcacaccacgccagccgttgtgcgaactgccaaaggtcaggtgacggcgaagtatgtgattgtcgccgggaatgcgtatctgggcgataaagtagagccggaactggcgaaacgcagcatgccgtgcggcacgcaggtgatcaccaccgaacggctgtcggaagatttagcccgttcgctgatcccgaaaaactactgtgtggaagactgtaactatctgcttgattactaccgtcttaccgccgacaaccgcctgctgtacggcggcggcgtggtctacggcgcgcgcgacccggatgacgttgagcgccttgtggtgccgaaactgctgaaaaccttcccgcagctgaagggcgtgaaaattgattaccgctggacgggcaacttcctgctgaccctgtcgcgtatgccgcggtttggtcgcctcgataccaacatctattacatgcagggctacagcggccacggcgtgacctgtactcatctagccggacgtttgattgccgaactgctgcgcggcgacgccgaacgtttcgatgccttcgccaatctgccgcattacccgttccccggcgggcgcacgctgcgcgtaccgtttaccgcgatgggcgcggcgtattacagcctgcgcgatcgtctgggcgtttaatttccgattaacagtgaagagtcaaaaggtgtgaaacatgagcaacaatgaattccatcagcgtcgtctttctgccaccccgcgcggggttggcgtgatgtgtaacttcttcgcccagtcggctgaaaacgctacgctgaaggatgttgagggcaacgagtacatcgatttcgccgcaggcattgcggtgctgaataccgggcatcgccaccctgatctggtcgcggcggtggagcagcaactgcaacagtttacccacaccgcgtatcagattgtgccgtatgaaagctacgtcaccctggcggagaaaatcaacgcccttgccccggtgagcgggcaggccaaaaccgcgttcttcactaccggcgcggaagcggtggaaaacgcggtgaaaattgctcgcgcccataccggacgccctggcgtgattgcgtttagcggcggctttcacggtcgtacgtatatgaccatggcgctgaccggaaaagttgcgccgtacaaaatcggcttcggcccgttccctggttcggtgtatcacgtaccttatccgtcagatttacacggcatttcaacacaggactccctcgacgccatcgaacgcttgtttaaatcagacatcgaagcgaagcaggtggcggcgattattttcgaaccggtgcagggcgagggcggtttcaacgttgcgccaaaagagctggttgccgctattcgccgcctgtgcgacgagcacggtattgtgatgattgctgatgaagtgcaaagcggctttgcgcgtaccggtaagctgtttgccatggatcattacgccgataagccggatttaatgacgatggcgaaaagcctcgcgggcgggatgccgctttcgggcgtggtcggtaacgcgaatattatggacgcacccgcgccgggcgggcttggcggcacctacgccggtaacccgctggcggtggctgccgcgcacgcggtgctcaacattatcgacaaagaatcactctgcgaacgcgcgaatcaactgggacagcgtctgacaaacacgctgattgatgccaaagaaagcgttccggccatcgcggcggtacgcggtctggggtctatgattgcggcagagtttaacgatccgcaaacgggcgagccgtcagcggcgattgcacagaaaaatccagcaacgcgcgctggcgcaggggctgctcctgctgacctgtggcgcatacggcaacgtgattcgcttcctgtatccgctgaccatcccggatgcgcaattcgatgcggcaatgaaaattttgcaggatgcgctgagcgattaatagcccaacgcaataatgtctgatgcgctgcgcttatcaggcctgcaaacgacgtattgattatgtatgccgaataaagcattcacgccgcatccggcaagttgtattgctcaacttcgctaaatctggtgctttttcaacaacgcgcggaactgatgataagttaaccccagtaattcagccgcgcgcttctggttatatttcccttgttgcaaactgagttgcagcaactctttttcctgctgcatctgaaactcacgtaaatccagcggcagtgttggaagcgaggtggtttctgaaacggcgatagcgtcttcaggcggacgccgtttaaagggatcaataatgatgtcatcaagcggataatcgctggtgccgtggcgatacactgaacgttccaccacgtttttcaattcacgaatatttcccggccaacgataattcagcaatgtttctctggcgcgctccgtaaaccccgggaacagaggcagcttgatttcccgacacatctggatggcaaagtgttctgccatcaacattatgtcgctttcgcgctcgcgcagtggtggcagttgtacaacatcaaaagccagtcggtcgagcaggtcagcgcgaaaagtgccttcattgaccatcgccgggagatcggcattcgtcgcgcataccaaccgcacattcacctgcaatggctggctgccgccaacgcgctccagttcaccgtactcaatcacgcgcaataatttctcctgcaccatcatcggtgccgtagcgagttcatcaagaaatagcgtaccgccgtcggcacgttcaaatctccctggatgacgtttttgcgcaccggtaaacgcccccgcttcgtgaccaaacagttcggaatccagcagattttcatttaacgccgcgcagttaagggaaataaacggcccttgccaacgggaggagagataatgcaggcggctggcaatcagctctttaccggtgccgcgttcgccgatgatgagcaccggtttgtccagcggtgcgagatgcgaaacctgttccagcacttcgagaaagctgttcgcctcaccaagtaaattatctttgtattctgccatgatgaaattcgccacttgttagtgtaattcgctaattcatcctggcatgttgctgatgattcttcaatcagatctttataaatcaaaaagataaaaaattggcacgcaaattgtattaacagttcagcaggacaatcctgaacgcagaaatcaagaggacaacattatgggtattttttctcgctttgccgacatcgtgaatgccaacatcaacgctctgttagagaaagcggaagatccacagaaactggttcgtctgatgatccaggagatggaagatacactggttgaagtacgttctacttcggcgcgcgcgttggcagaaaagaaacagctgactcgccgtattgaacaagcgtcggcgcgtgaggttgaatggcaggaaaaagccgaactggcgctgctgaaagagagagaggatctggcacgtgcagcgttaattgaaaaacagaaactgaccgatctgattaagtccctggaacatgaagtgacgctggtggacgatacgctggcacgcatgaagaaagagattggcgagctggaaaacaaattgagcgaaacacgcgctcgccagcaggcattgatgttacgtcatcaggcggcaaactcgtcgcgcgatgtgcgtcgtcagctggacagtggcaaactggatgaagcaatggctcgtttcgaatctttcgaacgtcgtattgaccagatggaagcggaagcagaaagccacagcttcggtaaacaaaaatcgctggacgatcagtttgccgaactgaaagccgatgatgcaatcagcgaacaactggcacaattaaaagccaaaatgaagcaagacaatcaataataacatccaggcggcgtccgaacgcgccgccgctcatcgtctaaggagtacttatgagcgcgctatttctggctattccgttaaccatttttgtgctgtttgttttaccgatctggttatggctgcattacagcaatcgttctggtcgcagtgaattgtcgcaaagtgagcagcagcgattagcgcaactggctgatgaagcaaaacggatgcgcgaacgtattcaggcgctggaatctattcttgatgcagaacatccgaactggagggatcgctaatggcgggcattaatctcaataaaaaattatggcgtattccacagcagggcatggtccgcggcgtctgcgccgggattgccaactattttgatgtaccggtaaaactggtgcgtatcctggtggtgctgtcgattttcttcggtctggcgctgtttaccctggttgcttacatcattttgtcatttgcgcttgatccaatgccggacaacatggcctttggtgagcagctaccttccagcagcgaattgctggatgaagtcgaccgtgaactggcggcaagtgaaacgcgtttacgcgagatggaacgttatgtcacttccgatactttcacgttacgtagccgtttccgtcaactgtgaggaaagttatgaatactcgctggcaacaggccgggcaaaaggtaaagcctggtttcaaattagcaggcaagctggtacttcttaccgcactgcgctatggcccggcgggtgtggcgggctgggcgataaaatcagttgctcgccgaccgctgaaaatgttgctggctgtggcgctggaaccgctgttaagtcgggctgctaataaactggcacagcgttataaaaggtgaggggagtttcgcaaaaattgttaaatctcaggcgtataatggatggcaattttcatccatagaaggacgcttacatgtttaaaaaaggcttacttgctctggcactggtgttttcactgcccgttttcgccgctgaacactggatcgatgttcgtgttccagagcagtatcagcaagagcacgttcagggggccatcaatattcccctgaaggaagtgaaagagcgcattgccaccgccgttccggataaaaacgacaccgtgaaagtgtattgcaatgccggacgccagtcagggcaagcaaaagagatccttagcgagatgggatatacccacgttgagaacgccggtggcctgaaagacatcgcaatgccgaaggtcaaaggttaaaagaattcaccatgagcggcgcttatgcgccgtttttttttctgtcacaccttatttacatccccatagattatttgcgtcagctcacaaatacgctttttccctggtaaaaaatgatttcctgcgtgactaaaacccttgtgctcaattgacagtttattttctgcggagtagtctctcgtttcatgggaccgctaccacggaaaggcaacatgaaacagaaaattacggattacctggacgaaatctacggtggaacatttaccgcaactcatttacagaaacttgtaacgcgtcttgagagtgcgaaacgattaattacacagcgacgtaaaaaacactgggatgaaagtgatgtcgtgttaattacctatgccgatcaatttcacagcaatgatttaaaaccattacccacatttaatcagttttaccatcaatggctgcaaagcattttttcacatgttcatttgttgccgttttatccatggtcatctgatgatggcttttcggtaattgattatcatcaggtcgccagtgaagcgggggagtggcaggatattcagcaactcggtgaatgcagtcatttaatgtttgattttgtctgcaaccatatgtcggcaaaaagtgaatggtttaaaaactatttacaacagcatccaggttttgaagatttttttattgccgttgacccgcaaaccgatctcagcgccgtcactcgcccgcgtgcgttaccgttattaacgccattccagatgcgcgatcattcaacgcgccatttatggaccacctttagtgacgatcaaattgacctgaattaccgtagccctgaagtgttgctggcgatggtggatgttttactctgttaccttgcgaaaggtgctgagtatgtccgcctggatgccgttggctttatgtggaaagagccgggaacaagctgcatccatctggaaaaaacacatctgattatcaaactgttacggtcgattattgataacgttgcgccaggtacagtgatcattaccgagaccaatgttccgcataaagacaacattgcttactttggcgcaggcgatgacgaagcacatatggtgtaccagttctcgctgccgccactggtgctgcatgcggtgcaaaaacagaacgttgaggcgctttgtgcgtgggcgcaaaacctgacactaccttccagcaacaccacctggtttaacttcctcgcctctcacgatggcatcgggctaaacccgctacggggcttgttgcctgaaagcgaaatattagagctggtcgaggcgttacagcaggaaggtgcattagtaaactggaaaaataatcccgacggtacacgcagtccgtatgaaataaatgtgacctatatggatgcgttaagccgccgtgagagtagcgatgaagaacgttgcgccaggtttatccttgcccatgcgattttgttaagtttccccggtgtgccagcgatatatattcaaagtattcttggctcgcgtaatgattacgcaggtgtcgaaaaactcggatataaccgtgcgattaaccgtaaaaaacatcacagtaaagagataacccgagaactgaacgatgaagctacattaaggcatgcggtatatcatgagttgtcgcgtttaattacactttgtcgcagccataacgagtttcatccggataataattttaccattgatacgattaattcatccgtaatgcgtattcaaagaagtaacgctgatggtaattgtctgactggattgtttaatgtcagtaaaaatattcagcatgtaaatattactaatctgcatggtcgggatctgattagtgaagttgatatattgggtaatgaaataacgctgcgcccctggcaggttatgtggattaaataaaaaggaacatctcatgattaaatcaaaaatcgtgctgttatcagcactggtttcatgcgccctgatttcaggctgtaaagaagaaaataaaacgaatgtatccatcgaatttatgcattcttcggtggagcaggagcgccaggccgttatcagtaaattgattgcccgttttgaaaaagaaaaccctggcatcaccgttaagcaagtgcccgtggaagaagatgcctataacactaaagtcattactctttcacgtagcggttcgctgccggaagtgatcgaaaccagccatgactacgccaaagtgatggacaaagagcagcttatcgatcgcaaggcggttgccacggtcatcagcaacgttggtgaaggcgcgttttacgatggcgtactgcgtattgtgcgtaccgaagatggtagcgcatggaccggtgttcctgtcagcgcctggattggcggcatctggtatcgcaaagatgtgctggcaaaagcggggctggaggagccgaaaaactggcaacagctgctggacgttgcacagaaactgaatgacccggcgaataaaaaatacggtattgcgctgcctacggcagaaagcgtgctgacggaacaatccttctcccagtttgcgttatccaaccaggctaacgtctttaacgccgaaggcaaaatcacccttgatacaccagagatgatgcaggcgctgacctattaccgcgaccttgctgccaacaccatgccgggttctaacgacatcatggaagtgaaagacgcctttatgaacggcaccgcgccgatggcgatttactccacctatatccttccggctgtgattaaagaaggcgacccgaaaaacgtcggtttcgtggtgccaaccgagaaaaactctgcggtctacggcatgttgacctcgctgaccattaccgccggacaaaagaccgaagagaccgaagcagcagaaaaatttgtcacctttatggagcaggcggacaacattgccgactgggtgatgatgtcgccaggtgctgcgctgccggtgaataaagcggttgtcactaccgccacctggaaagacaacgacgttattaaggcgctgggtgaactaccgaatcagctaatcggtgaactgccaaatattcaggtctttggcgcagtaagggataaaaactttacccgcatgggtgatgtgacgggttctggcgtggtgagctccatggtgcataacgtcaccgtgggtaaagccgatctccctggcacgctgcaagcgagccagaaaaagctggatgaactgatcgaacagcactaaacccaggacaggaatccgcaatgaacaggcttttttcaggtcgttccgatatgccgtttgcgctgctgcttctcgcgcccagcttattactgctgggcggtctggtggcgtggccgatggtgtcgaatatcgaaatcagttttttacgtctgccgctcaatcccaacatcgagtcaacgtttgttggggtgagtaactatgtgcgcattctctccgatcccggcttctggcactcgctgtggatgacggtctggtatacggcgctggtggtggcgggcagcaccgtgctcgggctggccgtggcgatgtttttcaaccgcgagttccgcctgcgcaaaaccgcgcgttcgctggtgatcctctcctacgtaacgccgtccatttcgctggtgtttgcctggaaatacatgttcaacaacggctacggcattgtgaactacctcggcgtcgatcttctgcatctctatgagcaggcaccgctgtggttcgataatccgggcagtagctttgtgctggtggtgctgttcgccatctggcgctacttcccgtatgcctttatctcgtttctggcgattttgcagaccatcgacaaatcgctgtacgaagcggcagagatggatggcgctaatgcctggcaacggtttcgtatcgtcacgctgcccgcgattatgccggtcctggcgacggtggtgaccctgcgcaccatctggatgttctacatgttcgcggatgtttatctgctgacgaccaaggtcgatattctcggtgtctatctctacaaaaccgcctttgcctttaatgatttaggaaaagcggcggcgatctcggtggtgctcttcatcattattttcgctgtcattctgctgaccaggaaacgggtgaacctcaatggcaacaaataaacgcacactcagtcgcatcggtttttactgcgggctggcgctgtttctcatcatcacgctgtttccattttttgtgatgctgatgacctcgttcaagggcgcgaaagaggcgatctcactgcatcctacgctgctgccgcagcagtggacgctggagcattacgtcgacatttttaacccgatgattttcccgtttgtcgactacttccgtaacagtctggtggtgtctgtggtttcatccgtggtggcggtattcctcggcattcttggggcttacgcgctttcccgcctgcgctttaaaggtcggatgaccatcaacgccagcttttacacggtgtatatgttctctggcattttgctggtggtgccgcttttcaaaatcatcaccgcgcttggcatttacgacactgagatggcgctgatcatcaccatggtgacgcaaactctgcccaccgccgtgtttatgctgaaaagctacttcgacaccatccccgatgagatcgaagaagcggcgatgatggatggcctcaaccgtctgcaaattatcttccgcatcaccgtgccgttggcgatgtccgggctgatatccgtgttcgtctactgctttatggtggcgtggaacgactatctgtttgcgtcgattttcctctccagcgccagcaatttcaccttaccggtgggcctgaacgcgctgttcagtacgccagattacatctggggacggatgatggcggcctcactggtggccgcattgccggtggtgattatgtatgcgctttcggaacgttttattaagagtggtttgaccgccggtggcgtgaagggctaaagcggccagtttctttacaaggagttttaaatgaaaaagttagtagccacagcaccgcgtgttgctgcgctggttgagtatgaagatcgggcgattttagctaatgaagtgaagatccgcgtgcgtttcggcgcaccgaaacacggaacggaagtggtcgacttccgcgccgccagcccgtttattgatgaagactttaacggcgaatggcagatgttcactccgcgtccggcagatgcgccgcgcggcattgagtttggcaaattccagcttggcaacatggtggttggcgacattatcgagtgcggcagcgacgttaccgactacgcggtgggcgacagcgtatgcggctacggcccgctctccgagacggtcatcattaacgcagtgaataactacaagctgcgcaaaatgccgcaaggcagctcctggaaaaacgccgtctgctacgacccggcgcagtttgccatgagcggcgtgcgcgatgccaacgtgcgcgtaggggattttgtggtggtggtagggcttggcgcaatcggtcaaattgccatccaactggctaaacgcgctggcgcttctgtggtgattggcgtcgatcctatcgcccatcgctgtgatattgcccgtcgccacggcgcggatttctgccttaaccccatcggcactgatgtaggtaaagagatcaaaacgctgaccggcaagcagggtgccgatgtgattatcgaaaccagcggctacgccgacgcgctgcaatcggcgctccgcggtctggcttatggcggcaccatctcctatgtcgcgtttgccaagccgtttgccgaaggttttaacctcggacgcgaagcgcatttcaataacgccaaaattgtcttctctcgcgtgcagcgaaccgaacccggattatccgcgctggagccgcaagcgtattgaagaaacctgttgggaactgctgatgaacggttatctcaattgcgaagatttaatcgacccggtggtgacctttgccaatagcccggaaagctatatgcagtatgtcgaccagcatccggaacagagcatcaaaatgggcgttacgttttaattcaaaggaatgaaaaaaatgaaaatcggcacacagaatcaggcgttctttccggaaaacattctggagaaatttcgttatatcaaagagatgggcttcgatggttttgagattgacggcaaactgctggttaacaacatcgaagaagtcaaagcggcgatcaaagaaaccggtttaccggtgaccaccgcctgcggtggctatgacggatggattggcgactttatcgaagagcgtcgtcttaatggcttaaagcagatcgagcgcattctcgaagcgctggcagaagtgggcggtaaaggcatcgtcgttccggctgcgtggggcatgtttaccttccgcttaccgccgatgacctcgccgcgtagcctggacggcgaccgcaaaatggtgagtgattccctgcgcgtactggaacaggtcgccgcgcgtaccggaaccgtggtgtatctcgaaccgttaaaccgctatcaggatcatatgatcaacaccctcgccgatgcccgccgttacatcgtcgaaaacgatcttaaacatgtacagattatcggcgatttctatcacatgaatatcgaagaagataacctggcgcaggcgctgcatgacaaccgcgacctgctcggtcatgtgcatattgcggataaccatcgctaccagccgggcagcggcaccctggatttccacgcgctgtttgaacagctgcgcgcggataactatcagggctatgtagtgtacgaagggcgtatccgggcggaagatcctgcccaggcgtaccgtgattcgttggcctggttgcgtacctgctaagaggtctttgtgaaaagtgcaatgacaagctctccgctgcgggtcgcgataataggcgcaggccaggtggcggataaggttcatgcttcgtactactgcacccgcaacgatctggaactggtggctgtctgtgacagccgcctttcccaggcgcaggcgctggcagaaaaatacgggaatgcatccgtgtgggacgatccgcaggccatgctgctggcggtgaaacctgatgtggttagcgtctgctcacctaaccgttttcattacgaacataccctgatggcactggaagcgggctgccatgtgatgtgcgaaaaaccgcccgccatgacgccagaacaggcgcgggaaatgtgcgataccgcgcgcaaactgggcaaggtgctggcctacgactttcaccatcgttttgcgctcgatacgcaacagctgcgtgaacaggtgaccaacggcgttttgggagagatttacgttaccaccgcccgcgccctgcgtcgctgcggcgttcccggctggggtgtctttaccaataaagaactgcagggtggtggcccgctgatcgacatcggcattcatatgctggatgctgcgatgtatgtgctgggctttccggcggtgaaaagcgtgaatgcgcatagctttcaaaagatcggcacgcaaaagagctgtggtcaatttggtgagtgggatccggcaacttacagcgtcgaagattcgctgtttggcaccattgaatttcataacggcggcattctgtggctgggaacgtcatttgcactcaacatccgcgaacagtcgattatgaacgtcagcttttgtggtgataaagctggtgcgacgctgtttccagcacatatctacaccgataacaacggtgaattaatgacgctgatgcaacgggaaatggcagacgacaaccgccatttgcgcagcatggaagcctttatcaatcacgtacagggcaagcccgtgatgatagccgacgccgagcaggggtacatcatccagcaactggtggcggcgttgtatcaatccgcagaaacagggacgcgtgtggaattatgaccaggccagtaacgttatcagaaccccatttcagccagcataccctgaacaagtatgcatcgctgatggcgcaggggaacggctatcttgggcttcgcgccagccatgaagaagattacacgcgccagacgcgagggatgtatctggcggggctgtatcatcgggcgggaaaaggtgaaatcaacgaactggtgaacctgcctgatgtcgtggggatggagattgccataaatggtgaggttttctcgttatcccacgaagcctggcagcgtgagcttgactttgccagtggcgaattacgccgcaatgttgtctggcgtaccagcaacggctcaggttacaccatcgccagccgtcgctttgtttcggcagaccaactgccgctcattgcgctggaaatcactattacgccactggacgccgacgcgtcagtgctgatttcaacaggcattgacgccacgcaaaccaatcacggtcgccaacatctcgacgaaacccaggtgcgggtgtttggtcagcatctgatgcaggggagctacaccacccaggatggacgcagtgatgtggccatcagctgttgctgtaaggtgagcggtgatgtgcagcaatgctataccgccaaagagcgccgtttactgcaacataccagtgcgcagcttcatgcaggcgagacaatgacgttgcaaaaactggtgtggatcgactggcgggatgacaggcaagctgctttagacgagtggggcagcgcgtcgcttcgccagcttgaaatgtgcgcgcagcagagttacgaccaacttcttgcagcatcaacagaaaactggcgtcaatggtggcagaaacgtcgtatcacggtaaatggcggcgaagcgcacgatcagcaagcgttagattatgcgctttatcatctgcgcatcatgacgcctgcccacgacgagcgcagcagcattgcggcaaaaggcttaaccggcgaaggctacaaaggccacgttttctgggatacagaagtatttttgttaccgtttcatctgtttggcgatccgacggttgcccgaagtttactgcgttatcgctggcacaacttgccaggcgcgcaggagaaagcgcgacgcaacggctggcagggcgcgctatttccgtgggaaagcgcgcgcagcggcgaagaagagacgccggaatttgccgccattaacattcgcaccgggctgcggcaaaaagtggcctcggcgcaggcggaacatcatctggtggccgatatcgcctgggcggttattcaatactggcagaccacgggggatgaaagtttcattgcgcatgaaggcatggcgctacttctggagacggcaaagttctggattagccgcgcggtaagagttaacgatcgtctggaaattcatgatgttattgggccagacgaatataccgaacatgtcaataataatgcatacaccagctatatggcccgctacaacgttcaacaggcgctgaatattgcccgccagttcggctgtagcgacgatgcgtttatccatcgcgccgaaatgttcctcaaagagctatggatgccagaaattcagcccgacggcgttttgccgcaggatgattcgtttatggctaagccggcgattaatctggcgaaatacaaagcggcggcggggaagcaaaccatactgctggattattcacgcgcagaagtgaacgagatgcagatcctcaaacaagctgatgtggtgatgctcaattacatgctgccggagcagttctcagcggcatcgtgtcttgccaatctgcaattttatgaaccgcgcactattcacgactcgtcattaagtaaagcaatccacggcattgttgccgcacgctgtggcctgctgacccaaagttatcagttctggcgcgaggggactgaaatcgatcttggtgctgatccgcatagttgtgatgatggtatccatgctgccgcaactggcgctatctggctgggggcgattcagggttttgccggggtgagcgtgcgtgacggtgaattgcatctcaatccggcgttacctgagcagtggcaacagttgtctttccctctgttctggcagggctgcgaattacaggtcactcttgacgcgcagcgtattgcgattcgaacttctgcgcccgtttcactgcgtttgaacggtcagcttataaccgtggctgaagaatctgttttctgtttgggtgattttattttgcccttcaatgggaccgctaccaaacatcaggaggatgaatgaaactgcaaggggtaattttcgatctggatggtgtaatcaccgataccgcgcatctgcatttccaggcgtggcagcagattgccgctgaaattggcatcagcattgatgcgcagtttaacgaatccctaaaagggatcagccgcgatgagtctctgcggcgcattctgcaacacgggggcaaagagggcgactttaactcgcaggagagggcgcaactggcgtatcgcaaaaatctgctctatgtccactcactacgcgagttgacggtcaacgctgttctacccggcattcgctctttgctggcagatctccgtgcacagcagatctcggttgggctggcttctgtctccctgaatgcgccgacgattttagcggcgctggagctgcgcgagtttttcaccttctgcgcggatgcttcccaacttaaaaactcgaaaccggacccggaaatctttctcgccgcctgtgcagggctgggcgtgccgccgcaggcatgtatcggcattgaagatgcgcaggcgggcattgacgccattaacgccagcggtatgcgctcggtggggatcggcgcgggcttaaccggggcgcaattactgttgccttcaacggaatcactcacctggccgcggttatcggccttctggcaaaacgtatagcaaaggaatcaacatggctcagctttcgttacaacatattcaaaaaatctacgataaccaggtgcatgtggtgaaggacttcaacctggaaattgccgataaagagttcatcgtgtttgtcggcccgtcgggctgcggtaagtcgaccaccctgcgcatgattgccgggcttgaggagatcagcggcggcgatctgttgatcgacggcaaacgaatgaatgacgttccagccaaagcacgcaatatagcgatggtgttccagaactacgcgttgtatccgcatatgacggtttacgacaacatggcgtttggtctgaagatgcaaaaaatcgccaaagaggtgattgatgagcgggtgaactgggcggcgcaaattctcggcctgcgtgagtacctgaaacgtaagccgggggcgctttccggcgggcaacgtcagcgagtggcgcttgggcgggcgattgtacgcgaagcgggcgtgtttttaatggatgaaccgctctctaaccttgatgccaagctgcgcgtgcaaatgcgcgcagagatcagcaagctgcatcagaaactgaacaccaccatgatctacgtgacccacgatcagaccgaagcgatgaccatggcgacgcggattgtgattatgaaagacgggattgttcagcaagtaggtgcgccgaaaaccgtttataaccaactcgcgaatatgtttgtttccggatttattggatcaccagcgatgaattttattcgcggcacgatcgatggcgataaattcgttacggaaacgcttaaattaaccattcccgaagagaaattagcggttctgaaaacacaggaaagtttgcataagcccatcgtgatgggaatacgaccggaagatattcatccggacgcgcaagaggaaaataacatttccgccaaaattagcgtggcagaattaaccggtgcggaatttatgctctacaccacggttggggggcacgagttagtggtccgtgctggtgcgttaaatgattatcatgcaggagaaaatatcactattcattttgatatgacgaaatgtcatttctttgatgcagaaacggaaatagcaattcgctaaatacagggggaagacattcccccaggataatacaaggaacaataatgaaaaagttattaccctgtaccgcactggtgatgtgtgcgggaatggcctgcgcacaggccgaggaaaggaacgactggcactttaatatcggcgcgatgtacgaaatagaaaacgtcgagggttatggcgaagatatggatgggctggcggagccttcagtctattttaatgccgccaacgggccgtggagaattgctctggcctattatcaggaagggccggtagattatagcgcgggtaaacgtggaacgtggtttgatcgcccggagctggaggtgcattatcagttcctcgaaaacgatgatttcagtttcggcctgaccggcggtttccgtaattatggttatcactacgttgatgaaccgggtaaagacacggcgaatatgcagcgctggaaaatcgcgccagactgggatgtgaaactgactgacgatttacgtttcaacggttggttgtcgatgtataaatttgccaacgatctgaacactaccggttacgctgatacccgtgtcgaaacggaaacaggtctgcaatataccttcaacgaaacggttgccttgcgagtgaactattatctcgagcgcggcttcaatatggacgacagccgcaataacggtgagttttccacgcaagaaattcgcgcctatttgccgctgacgctcggcaaccactcggtgacgccgtatacgcgcattgggctggatcgctggagtaactgggactggcaggatgatattgaacgtgaaggccatgattttaaccgtgtaggtttattttacggttatgatttccagaacggactttccgtttcgctggaatacgcgtttgagtggcaggatcacgacgaaggcgacagtgataaattccattatgcaggtgtcggcgtaaattactcgttctgataatgggctaaattgccggatgcggcgcgagtactttatccgatctataaatgtaggccggataagatgcgctagcatcgcatctggcattcaggcaaggtagctggtatttatttcagcgtcatatgcgtggcaacggtaatattctgtggtgacggttttccagaaattaagcggaataataactcgcagctttgttgacctaactcctgcgtcggaacatcgatgccgcccggtgcaggcgttaaaataaatgacagcgtttcattgctataacccaccaccgctaactgctgcggaatagcaatatttttctctgctgccgcacgataaatgctcattaatttcaggctgtcagtggcaaacaccgcctcaggcaacggtgactggcttaataattgccgtgctgcttttaatgcagtttcatgggtataaccgccatcaacaatccattcatcacgcactgcaatattatgcgcagccaggctctgcttataaccattaacgcgatcaaccgaaacatggacatcaagcggagcatgcaggcaggcaatattttgatgcccactttcaattaatgcatcggtcaacgcaatgctgtcgccaaaattatcggtatcgacagaataaacatgggcatattgaccttcaactttgccaatcaccaccaccggaatatcatatttatcgagttgggcaaaaaatgactcatccgctggcgaactgagcataataatgcctttaatcattttctgcttaattttgctttcgcatttttgcagatcttctgccggattgtgcgacgtttgtaatatcacgtcgaaaccttcttcttcagctttggcggtgatggcatgcaaaacttcagagaaaaacggattacccgccgtagttttggtcgaacgggtagaaatcaccataatggcatcaaaacccgaagaggtcagcgcgcgggccagcttgtttggctgatactgtaattcttcaatggcccgtaacactttttcgcgcgcttccggggagatattagtttgcttattcagcacgcgtgatacggtggattttgatacgcctgcaaccctggcaatatcataaatagtaggggacataggtcaggaactccgtccgaacgtgaatgctgcacatcttatggagttcgccggtcgatgacaacacgggcagttgataatcaatggcctggcccccacattcatatccttacgaatgattttttttctggtcttcagagcagcacaggacagcaatgaagcgacttaaaaatgaactcaatgcgctggtgaatcggggtgtcgacagacatctgcgcctcgctgtaaccggacttagccgcagcggcaaaacagcgtttatcaccgcgatggttaatcagttgcttaatattcacgccggagcacgtttgccgctgttaagtgcggtgcgtgaagagcgcctgctgggcgtgaaacgcattccccagcgtgactttggcattccgcgcttcacctatgacgaagggctggcgcagttatatggcgatccacccgcctggccaacgccaacgcgcggcgtcagtgaaatccgcctggcgctacgttttaaatcgaatgattcgctgctacgccactttaaggatacctccacgctgtatctggaaattgtggattatcccggcgaatggttgctcgacctgccgatgctggcgcaggactatttaagctggtcgcgccagatgacgggcttactcaatggtcagcgcggagaatggtcggcgaaatggcgaatgatgagcgaagggctggacccgctagcgcctgccgacgaaaaccggctggcggacattgccgccgcgtggaccgattatctccaccactgtaaagagcaggggctgcactttattcagcctgggcgctttgtcttgccgggagatatggcaggtgcgcccgcgctgcaattcttcccgtggccggatgtcgatacctggggcgagtccaaactggcgcaggccgataagcataccaatgccggaatgctgcgcgagcgctttaattattactgcgagaaggtggtgaaggggttctataagaatcattttctgcgctttgaccgccagattgtgctggtggattgcctgcaacctctcaacagtgggccacaggcatttaatgatatgcgtctggcactgacgcagctgatgcaaagttttcactacgggcagcgtaccctgttccggcgtttgttttcgccggttatcgataagctattgtttgctgccactaaagcggaccatgtgaccatcgatcagcacgctaatatggtttcattactgcaacaactgattcaggatgcctggcaaaatgcggcgttcgaagggatcagcatggactgcctggggctggcgtcagttcaggcgaccaccagcggcattattgatgttaacggtgagaaaatcccggcgctgcgtggtaatcgacttagcgatggcgcaccgctcactgtttatcctggcgaagttcccgcacgtttgcctggtcaggcgttctgggataagcaaggcttccagtttgaggcatttcgtccgcaggtgatggatgtcgacaaaccactaccgcatattcgtcttgatgctgcgctggaatttttaataggagataaattgcgatgaccgaaccgttaaaaccacgtattgatttcgacggtcctctggaggtcgatcagaatcctaaattcagggcgcagcagacctttgacgaaaatcaggcgcaaaattttgccccggccacgctcgacgaagcgcaggaagaagaggggcaagtcgaagcggtaatggacgcagcgttacgtccgaaacgcagcctgtggcgcaaaatggtgatgggagggctggctctgtttggcgcaagcgttgtcgggcagggtgtacagtggacaatgaatgcctggcaaacccaggactgggtggcgctgggtggatgtgccgctggggcattgattatcggcgctggcgtaggttctgtggtaacagagtggcggcgcttatggcgcttgcgacagcgcgcccatgaacgcgacgaagcgcgtgatttattgcatagccacggcacgggcaaaggccgcgcattttgcgaaaaactggcgcagcaggcgggtattgatcagtcgcatccggcgctgcaacgctggtatgcctcaatccatgaaacgcaaaacgaccgtgaagtggtcagcctgtatgcgcatttggtccagccagttttagatgcccaggcgcggcgcgaaatcagccgttcggcggcggaatcaacgttgatgattgcggtcagcccgctggcgttggtcgatatggcgtttatcgcctggcgcaatctgcgtttaattaatcgcatcgccacgctgtatggcattgaactggggtattacagccgtttgcgtctgtttaagctggtattgctgaatatcgcttttgccggagccagcgaactggtgcgcgaagtggggatggactggatgtcgcaagatctcgctgctcgtttgtctacccgcgcagctcaggggattggtgcaggacttctgacggcacgactcgggattaaagctatggagctttgccgcccgctgccgtggattgacgatgacaaacctcgcctcggggatttccgtcgtcagcttatcggtcaggtgaaagaaacgctgcaaaaaggcaaaacgcccagcgaaaaataatgcaatatcgggtgctgaccggatatctttacgccgaagtgcccgtttttccgtctttgtgtcaatgattgttgacagaaaccttcctgctatccaaatagtgtcatatcatcatattaattgttcttttttcaggtgaaggttcccatgcgtctggaagtcttttgtgaagaccgactcggtctgacccgcgaattactcgatctactcgtgctaagaggcattgatttacgcggtattgagattgatcccattgggcgaatctacctcaattttgctgaactggagtttgagagtttcagcagtctgatggccgaaatacgccgtattgcgggtgttaccgatgtgcgtactgtcccgtggatgccttccgaacgtgagcatctggcgttgagcgcgttactggaggcgttgcctgaacctgtgctctctgtcgatatgaaaagcaaagtggatatggcgaacccggcgagctgtcagctttttgggcaaaaattggatcgcctgcgcaaccataccgccgcacaattgattaacggctttaattttttacgttggctggaaagcgaaccgcaagattcgcataacgagcatgtcgttattaatgggcagaatttcctgatggagattacgcctgtttatcttcaggatgaaaatgatcaacacgtcctgaccggtgcggtggtgatgttgcgatcaacgattcgtatgggccgccagttgcaaaatgtcgccgcccaggacgtcagcgccttcagtcaaattgtcgccgtcagcccgaaaatgaagcatgttgtcgaacaggcgcagaaactggcgatgctaagcgcgccgctgctgattacgggtgacacaggtacaggtaaagatctctttgcctacgcctgccatcaggcaagccccagagcgggcaaaccttacctggcgctgaactgtgcgtctataccggaagatgcggtcgagagtgaactgtttggtcatgctccggaagggaagaaaggattctttgagcaggcgaacggtggttcggtgctgttggatgaaataggggaaatgtcaccacggatgcaggcgaaattactgcgtttccttaatgatggcactttccgtcgggttggcgaagaccatgaggtgcatgtcgatgtgcgggtgatttgcgctacgcagaagaatctggtcgaactggtgcaaaaaggcatgttccgtgaagatctctattatcgtctgaacgtgttgacgctcaatctgccgccgctacgtgactgtccgcaggacatcatgccgttaactgagctgttcgtcgcccgctttgccgacgagcagggcgtgccgcgtccgaaactggccgctgacctgaatactgtacttacgcgttatgcgtggccgggaaatgtgcggcagttaaagaacgctatctatcgcgcactgacacaactggacggttatgagctgcgtccacaggatattttgttgccggattatgacgccgcaacggtagccgtgggcgaagatgcgatggaaggttcgctggacgaaatcaccagccgttttgaacgctcggtattaacccagctttatcgcaattatcccagcacgcgcaaactggcaaaacgtctcggcgtttcacataccgcgattgccaataagttgcgggaatatggtctgagtcagaagaagaacgaagagtaagcgcgaatatgcctgatggtgcaacaccatcaggcatattaaattatgctttcagtacagccagagctgcttcgtaatccggctcggtggtgatttcatccaccagctggctgaaaatcacattgtcattttcgtcaataaccacaacggcacgcgctgccagacctttcagtgggccatcagcaattgccacaccgtaagcttgcagaaattcagcgttacggaaagtggagagggtgataacgttgttcagaccttctgcgccgcagaaacgagactgggcgaacggcagatcggcagagatacacagcacaacggtgttgtcgatctcagttgccagttggttaaacttacgtactgatgcggcgcaaacaccggtatcaatactcgggaaaatgttcagcactttgcgtttacccgcaaactgaccgagggtgacgtcagacagatcttttgccacgagagtaaaagtctgcgctttgctacccgcctgcgggatggaattggcgactgtaaccgggttgccctggaaatgaacggtttgtgacatgattatctttcctgtttacatatagttaacgtcacacctagtttatgctaactgtcaataacacagcaaacgctatttgcgcttaatccgcagaccaccgcgacaacaaggagtaaagatgagaaccgttaaggtattcgaggaagcctggcccttacataccccgtttgtgattgcccggggaagtcgcagtgaagcgcgcgtggtggtggttgaactggaagaagagggtattaaaggcaccggcgaatgcacgccgtatccgcgttatggggaaagtgatgcctcggtaatggcgcaaattatgagcgtcgtgccgcaactagagaaagggctgacacgggaggagttgcaaaaaattctccctgccggcgcagcacgtaatgcgctggattgtgcattgtgggatctggtcgcgcgaagacagcagcaatcgctggctgatttgatcggcataacgcttcccgagacagttatcactgcacagacggttgtcatcggtacgcctgatcagatggccaatagtgcatcaacactctggcaggcaggcgcgaaattactgaaagtgaagctggataaccatcttatcagtgagcggatggtggcaattcgcacagctgtgcccgatgcgacgctgatcgttgatgcaaatgaatcctggcgtgcagaagggttggcggcgcgttgccagctattggcggatttaggcgttgcgatgcttgaacaaccgcttcctgcgcaggacgatgcggcgctggagaattttattcatccgttgccgatttgtgctgatgaaagttgtcatactcgtagcaatttgaaggcgctgaaagggcgctatgagatggttaatattaagctcgataaaaccgggggtctgacggaagcgctggcgctggcgactgaagcgcgtgcacaaggtttcagtctgatgctgggctgcatgttgtgtacctctcgtgccattagcgccgctttaccgctggtgccgcaggtcagtttcgccgatcttgacggaccgacctggctggcggtagatgtggaaccggcgcttcagttcacgacgggcgaattgcatctttaggatgccagcgcagcaagtttgccatcgcaaagagatatttttcgctggcttcgtcggaggagatgggcggaaactctgcggtgatgcaatgcaagttcagatctgcacaccaactgccgaaagagccaggcgtttcataaccgacgctggttaccagaggcaattcaaacgcctgagccagccattcgcctaattcgctgtgtctgggatcttcaatacaggccagtggatcgtggaatgagaccacccaggcaggttgaatgcggtgtataagctggcacagcgcctgggtttcaggttcggagccaggtttgtcacctgtcagtaatacgacatcgcgttcttcagcggcgctgttccagcgataaacggtttcaccttccttccagttcgccgccggaaagtttctgtttaaatccacaccattagcattggcccgtaaccccaactggcagccgtcaggattcacacacagcaccacatgatgacggcgcaaagaaggtgtcaacgtccgcagagcacaggagagcgtgacgaccgaagagttttcatcaccgtgagtgccagccagaatcaaaccactttcgcggctggctgcaggggcaggaaaccagattaacggcgcgcccaataatgaacgtccgtaatgttctgttccgggcggaaatgcgccgcgttcggcgcgtgggcgggttacggtcatgatcgtctctggttcaggaagtattacaggcagtgttgtgcaaattttgcggattatcaaatccttttcttcaacgctatgtcatcgatcttgtatcacttttttgccggaagttgtttgcattttattagttggatagggtttgtggatttttgctggctgacgggcaaataaagtttgtttaatggtttgcttatctgccagttgattaatcacatggcgggctatctgaccgccagcaccaagaatcagtacatttttcatgaaaattatcccagattattggcagcaatatgccaggccatatcactattgcggatttgaatatgtttcattacagagtttcctcaaagaacggagctaatactgaaattgcttcagccacataggctttgccgtcataaagatccatatggtttgcgccttcaacaatgtgatagcgtttatcctggcttgatgctcgatcgtacaggtcgtcactcatccatttgctccctgcctggctgcccgccacaatctgcgtcggctgagtcaggtacacttccgccatatggtaagcatcataggtaataatctggttaaggctgcgcaaagtagcgtaacccggtgctgttggatactgcgcgcgaggggtgtggtaatactcccaggcctgacgcagttcttcgttcggcgcatcggactccttcattggtgccagtggcataatggcgtattctccgctgctaatatcgctggttctggcgtttgaacccgcttcaacgtatggcagggcatcaatagatttcacattgttttcccaaccattacggaatatcgaaccaatattgaccgcactaacggtaccgatggccttgatgcggcgatcctgaattgcagcattggctgtatatcctgcaccggcacaaattcccatcgcaccaattcgggtattgtcgacataagaaagcgttgtcaggtaatcaatcacggcactgatgtcttcagtacgaatgtatgggttttctaactgacgcggctcgccgccactttcaccttgataagatgcgtcataagcaatagtgacaaatcccttttccgccagttttttggcataggttccggccgtttgttctttaacgcccccacctgggtgagataacacaattgcctgatactgacgggtttcatcaaattttggagggaaatagatcactgcagacaaagagatggttggattattgctgttagtgaagctgactttattattcatcattccgttcctcatggagttgtcggttcgttttaacggttggtgatatcactatagatattgatcattaagttgattagacccaaaatcatgattagacctatcatttaaatgattaatagattgcatggagatactgaatgaagcgtgaagaaatcgctgatctgatggcgtttgtcgtcgttgcagaggagcgtagcttcactcgtgcagcagcccgcctgagcatggcgcagtcagctttaagccagatagtgcgtcgtatagaagaacgattgggattgcggcttctgacgcgaaccacgcgcagcgttgttccaactgaagcgggcgagcatcttttgtctgttcttggccctatgttgcatgacatagattcagccatggcatccctgagcgatctgcagaaccgcccatccgggacaatacgtattactactgtagaacatgcagcaaaaacgatattgttaccagcaatgcgcacattcctgaaatcgcatcctgaaattgatattcagctcaccattgattatggtttgaccgatgtcgtttctgaacgttttgatgcaggcgtccgtctgggtggggagatggataaagatatgatcgccattcgaatcgggccagatataccaatggctattgttggctcaccggattatttttctcgccgaagtgttccaacgtcagtgtcacaattaatagatcatcaggcaattaatttgtatcttcccacatcgggtacagcaaatcgctggagattaatacgcggtggacgtgaagttcgtgttcgcatggaaggtcagcttttactgaatacgatagacctgatcattgatgctgcaattgatgggcatggattggcgtatctaccttatgatcaggttgagcgggctattaaagaaaaaaaactgatacgtgttttggataaattcacaccagatttacccggttatcacctgtactatccacaccgtcgacatgctggctcggcattctcattatttatagataggctgaagtataaaggtgctgtttagcactacttgctgatacattaatttaattcttctcttaacgtattctcagttcctttcaacgttttggtcattttttattcttcgtacaatggcgacagatgctgattatgataccgaaaacgggtttgaacgtgcgaagcccgaacgtagtgttcggagttctatgtgctttaccgcattttggagactattatttacactaaatctgatttgatatattgatacttaaaacatttgatgcttcctttgtcacttttttgatggaagttgtttgcatttctttaaggcgaaacaaataattacgcatcaattttaatgtcggttagagggaaacttatgaagcactctgtttcagtcacgtgttgtgcgctgttggtcagcagcatttctctttcgtatgctgcagaagttccgagcggcacagtactggcagagaagcaggagctggtgcgccacattaaagatgagcctgcgtcgctggatcccgctaaagccgtgggcctgccagagattcaggtcattcgcgatctgtttgaaggtctggtgaatcagaacgaaaaaggggagattgtccccggcgttgcgactcagtggaaaagtaatgacaaccgtatctggacttttaccctgcgcgataacgcaaaatgggcggatggcacaccggtaacggcgcaagattttgtctacagctggcaacgtctggtggacccaaaaacattgtcgccatttgcatggtttgccgcgctggcgggaatcaacaacgcacaggcgattattgatggtaaagctacgcctgaccagcttggcgtcaccgcagttgatgcccatactttgaaaattcagcttgataaaccgttgccgtggtttgtgaatttaaccgctaactttgccttcttcccggtgcaaaaagccaacgtagaaagcggtaaagagtggacgaaacccggaaatctgatcggcaatggcgcttatgttcttaaagagcgcgtagtcaatgaaaaactggtcgtggtaccgaatacccattattgggataacgccaaaacggtactgcaaaaagtgaccttcctgccaattaatcaggaatccgtagccactaagcgttacctcgcgggggatattgatatcaccgaatccttcccgaaaaatatgtatcagaagctgttgaaggatattccggggcaggtttatacgccgccgcagctcgggacctattattatgcgtttaacacgcaaaaagggccgacggcagatcagcgcgttcgtctggcattaagtatgacgatagatcgccgcctgatgaccgaaaaagtattagggacgggcgaaaagccagcgtggcattttacaccagatgttaccgcgggatttacgccggaaccttcgccgtttgaacaaatgagtcaggaagaactgaatgcgcaggcaaaaactttgttgagcgcagctggttatggtccgcaaaaaccgctgaagctgacgcttttgtataacacttcagaaaaccatcaaaaaattgcgattgctgtagcatcgatgtggaaaaagaaccttggcgtagatgttaaattgcaaaatcaggaatggaaaacctatatcgatagccgtaacaccggcaattttgatgttatccgcgcctcgtgggtgggggattataatgaaccctccactttcctgacattattaacgtcaacgcattcaggaaatatttcacgctttaacaatccggcatatgacaaagttctggcccaggcatcgacggaaaataccgttaaagcgcgtaatgccgattacaacgcggcagaaaaaatcctcatggagcaagcaccgattgcaccaatttatcaatataccaatggacgattaatcaagccgtggctgaaaggttatcccattaataatcctgaagatgtggcgtacagtcggactatgtatattgtgaagcattgatgtgatgggaactggcgttacccttgtgcataacgccagtgatgtctgatttagcgaccctgttccggcggtgtaatgttatccatatacagcgtctggctggggaaggcaaagtccgcgccgtgtgactgtacaatatcgataatcttcaaataaacgtcttgctgtgcagcaagccattcagcccataccgtggttttggtaaagcaataaaccataatattcaatgaagagtcagcaaactggttgaaataaaccagtaaggtttgtcgctggtcgatggccgggtgatttttcagcatctcacgtacagcttcgacaataacgcccacttttgccgcatcctcataacgtaaaccaatggtcgtggtaatgcggcggttggtcattcgtcctgggttttctacgctgatcgacgaaaacagcgagttcggtacgtacaatggacgattatcaaaggtcgtaattttggtaattcgccagccaatttccgctactgtaccttcgatatttctgtccggtgaacggatccagtcgccaatactgaaaggacggtcgaaatagagcataatcccggaaaagaagttactcagaatatctttaccggccataccgacagccagaccaccaataccaccaaaggtcagcaagccagaaaggctcatgccgaaatgttcgccataaagcagaacaagcaccacaataatggtgattttgatgatacgcgacataatccgcgcactggtgatatcgcgaccttttttaatctgctgtttttcaaactgattaatcagcagaaatagcttaatcgtcagaataaccgcaatcagggacgtacagataaaatcgataacgcctggggtgataaatttgagtttatagttttctataacataattaataatgctaccaacagcactgataattatggtgtagattaaaaattgcaccgcatggaataaaaatccttttcttttacgatttccacggcgaaaccaaaagctcatcagaatcaatgctgcgcagctaccgaaaataatgaccagattaagcgcattatttgtaaacagttcagcgatcattgttttatcaggctcctccagataattgtcgtcatgccggaaacccctggcggggctattttaccgcgacaattcattcagatcatcaatagtcagggaaggaagtagcaacattagctaactaatcaatgcgttgattgtaaatccagctaagaggtgaggttttcagagcagacaacggtgaaatgtcatggtattgttacgtttaggtaacaagaaatttgtctgcacaaggattacatcatgattatggcgaaactgaagtcagcgaaagggaagaaatttctctttggtttgttggcggttttcattattgcggcgtcggttgtgactcgcgcgaccatcggcggcgttatagaacagtacaatattccgctgtctgagtggacgacatcaatgtatgtgattcagtcatcgatgatttttgtttatagcctggtctttactgtgttgctggcaatcccgttgggaatttatttccttggcggcgaagagcagtaagtaaaaaataggcccgataactcgggccttgtcagttattgaagagtcgttaatcgtcttcttcgtcatccagttcaacgggtgtctgatactggtcaggtttaatgaccagcaggtcgcagcgaagatgatcaatcacctgttccgccgtgttgccgaggaatgctgctgaaataccggtgcgtcctaccgtgcccagaaccacaatccccgcctgtaagtgctccgccaaatcaggaatcacctcttctggcagacctttttctacgtgcgtcatgttttcattaatgccgaatttctgccgcagggctttcattgccagcaaatgttgcccacgaatggcatcgttataaacgctcgggtcaaattccggcagttcaatcgcgatattaattggcgttaccggataagcgccaaccagatgaacttcggtatggttgacttgttctgccagttcgatcgtctctttgaccagtttttcattgagcgcattatgatacggctcttcactggcgagattcaccgccaccagcgccttgcctccttccggccacggctggtctttcaccatccacaccgggcttgggcatttgcgtaacagatgccagtccgttggcgtaaaaatcaccgcttccagacggtcatgttggtgcgccatttttagcaccaaatcgtgtccgccgctgatcacttcctgaatgatggcttcgaaaggacggttatgccagaccactttaatttcaatgggaacgccagcattgagataatattttgcctgctcgtggatccaggctgtacgctggctgatgacgccctgacgcatagcggtacgttcgtccggggagagcagggtggtcatttcgtatgagaagtcatagatcggcaaaaaggctttaattttgccaccaatccgttgatgtaaataaacagctcgccgcaatgctggttggtcgtcctggttaggatcgataacaacgagcatgttctgatacatagccatacagggtctccttacaacaactgtcaacgcagtttgtaattaaaagattaacccatatctggtgaatgaaacagtgatgaaccttctgccagatcaataaatcagaaaaatttaatgatatgacagaaggatagtgagttatgcggaaaaatcaggcaacgttacgcgtatgaccagcaagctgggccagcgcatcgttattttcgatggtgatgtatttacctttgactgccagcatgccgcttttctggaagcgacccagcagacggctgatggtttctaccgtcaggcccagatagttaccgatatcgccacgagtcatcgtcaggcggaattcacgaggggagaagccgcgttgggcaaaacgacgggacaggttgtagatgaatgcagccagacgttcctcggcatttttcttcgacaacagcaggatcatgtcctgatcgcctttgatttcaccgctcatcagacgcatcatctgctgacgcagattcggcattttaccggacaaatcgtccagcgtttcgaacgggatttcacataccatcgaggtttccagcgcctgcgcgaagctcgggtgatggccgctgccgatggcgtcaaatcccaccaggtcgcctgctaaatggaaaccagtgatttgctcgtcgccttgctcagtgatggtataacttttaatcgtaccggagcggatggcataaagcgatttaagttcatcaccagccttaaacagcgtctggcctttctgaataggcttcttccgctcaatgatattatcaagctgatcaagctcatgttcgttgagtgtgaacgggatgcaaagctggctgatgctgcaatcctggcaatggatagcacaaccgccagactgaatgcgccgtataattcgcttttccgggatcataggtctgctcaagccgtaattgatatttgtcaattttaacatctttttagggagcaagtaagtctaagcaaaccttaacagcagagaattccgatattagatgtaaatatatgtctatctatttgaaaacccttaagttgttaagggtaactttacataaaagtgtgaacaagctggcacaaattgtttaatgtttacagcaaaagataaccttcatggcgcaataaccactcttttcgctgaactccgcctgcatatccggtcatggtgccgtttcggccaataacccgatggcaaggtacgacgatgctgatgggattcgatccgtttgccgcaccaacggcacgcgccgcgccaggacggcccaattgctcagccagttggccgtaatgcattacctgcccgcaggggatagtgcgtagtgttttccagacttcgcgctgaaatggcgtcccccccgtagcagtgggaagcgtatcaataatgctaagattaccggcaaaatattcacgaagcttgtcgcttaaaccgcctggattggtggcagaaatgcgctcatagccttctttgcgataatggatgtccagcagctgcaccatgcgttcgctgtactcttcccattcaaccgcccgcaggcgaaattgctcatcgcaaatcacccacagtggacccagtggcgtggcaattttttcttcaagtaatctcagcatccgttctctcttaagacaaacgtgggtaaatacccggacctatcggcagaccgacaagataccacgccagcaacatcagcagccataccaccaaaaagataagcggataacgctatttctatcatttcacatcgtgtcacatcgtcaccgcttcacattgattttaaaagaaatatttattctatcgtgtcatatcgttttctatcgtgttactatccatgcgtgaaatgtgtgtaccaaatagtgaccaaatttatgcttacagataccaaattacgaaacatccacggcaagccatatgacggcccggaggaagtcccggacgcgggcggattgtctgccaggataagcccgcacggggttatatctttccagtatcgctaccgattcaacggcaagccgcgacggatgaagattggcacttacggagaaataacactcaaagaagcccgcgcggcggtggcggagcataaggaggtcttaaactcaggacgagatccatcgatcgtaaaaagaatgaacttgtcccgcgttacgacacgggcaacaattgaagatattgttagggagtacatggaatcaccgcaggcaagaaacatggtcaactataagcaagtcgaggcgatgctaagtaagcacattgtcagaccatgcggtagctatatcgtcgatgatatggactccataatgtgggaggggatttttagaaaggtagctaatggtggcgcgcccgttcaggcagggatagtcttaaacaggatgaaggcggtaataaaatatgccatgcgacgccgccgcgtggagcgtgacgacatatcattgctacgcgtgaaagacgtaggcaaaaacccggcgcaaaggaaacgcgtcttatcaatacaagagattcaccatctaatcagcattatagacagttcaaaaatggcgcggctaaatcagatattgatgaagctgattatattcaccggatgcagaacaagcgaactaacaaacgcaaggcgcgaacatttcgatcttgataactgcgtgtggaccgtgccgggtgcattgagtaagaacagaaatgagtttaagcgcggtttatccgacgttagcgttgatttattgcgtgaagctatggatttgcacggctttaattttatcttcgttcccgtgctttctggaagggatgaagcggtagacaggagcgtgccgaaaacagccgcaagggatttgatgctaaggatgggcggcgagccgtggtcgtgtcacgacttgcgccgcactgtaaggacaaacctttcagcgcttggcattgcgccgcacgtagcagaaaaggttttaggtcataaactggcgggaatgatggctatatatgatcagtatgattacgtgaaggagcaaatagaggcgatgaataaactggctgattactacatgaagcccattgatttacaaaatgaaataacgtcctgataacggtaaagagatccgccgcgctttaacgctggcatcccattaacaggttcagggaaaggagttcccgcatctttccattttttaacgagcttaaaaaatgcggacttgctaagtccgcctaacattttttgcacttgctcacgattaataaggattgtcccgatcttatccattatcttttccccgtgtattcaacgtgtccgatacatccatcaataattgcttgcgccatattgcgataatcgcacgaaaattcgttgtcgcggttaaagtcaatctcttttgccgcatcctcaccaataacctttgtagcaagcgcaaacgcaatttgcgccagtgctttttctttcggatcaatatgaattcgatacgagtattgtttccatgcaatcggtgtttcaatatcagtttctaacttactgtgagcaatagaccacttatcgccaatgtagaaaaacttaactacatcaatcactctatcacttgccaatccaatacaatcaagccacacgccgcacggcggcttttctcccggtttccattccgtaacttccggcttatcgcaatcatgccgctcatcttcgattaattcatcaatgatttcactttctttattcatgccgtcatcatccttattcgataaatcatcgtatttttcaaatttccaccctgaagccatagccgaataagtgccgccattgtcagcacgaatacccaataaatagtatgttccgaaattatattctgtgcggcatgttgccacctcaaacgatgggtaacactcagggttagtgcgatggctaatcacgccaattgctttaagtttattcatttgcttatcctcaattacgccaccgttacattgtcaactttgataaaatattcaggatggttttctatttcgtgcttaaagtgcgcatgacacaatcgccaatcacgcgcctgattgtgaaaatagtaaacgtattcgccatcaatcttgtataaaatgcctgtaggtttagccatataataactaaccatcattgcccccagcgttttatgaattcctcgtttaatttcgtatcacccgaccattgaacatcatgttcagcgccgaacgagtaaatcaattcgatcagttcactgaattctgatttactcattcgacttgttgacgttcccaatacaacgaagccggatttatccaggttagggacgacgccatatttcttaagtccggcagtgaataccgctttccagtcttccggtgacagctttttaccgtaccaattaacctgatcgctaatgtcggttaacagcgcccaaagcaacgcattttggcttagcgagcgggttttctcctggatggtaattatcagcgggcttttgctatcaggctggatctctcttatctgcctgatagcattttctttcacggcgtcgtttactatctcaaatctaatttgcctcataatacaccgttgctatttttccattgtgcccgtgcgtacataatcgcctgcaaagaaattagccgcgagcttgtcatgaaagcgccttttaaatatttcatgtcaaccgtgacaggtttatcaggatcatcgccgcgcatgtattcagcaatagtgcttaaatcctccacggttaactccaaatccttgttcatgattcccccttacacaatccgcattgtgtttcgtaattcaccacgcagcgccagtaatgcatcgcgcattggcacgaaaacccggttaaattttacgtgtttatatttccgcattagtggcggtgtatacaccattgcgtcgcatacttcccacggataataaacacgcgtatcatcaacaaacgtttcaactgaataaaagattactcgtctcataattctaacaccgtttcctcgttaagtttttcaatctcaaatactggtttatcaggtagcaggccgttatttttccggtattcgttcaggcggctgtcaaagtcaaacgcaagatcattagcgtgaccaaagcgaccaggtttaaacagtgagtaaaaattaaggccgtgtttattggtatctatgcaaagtgtttcatccagtaccattaaacgcagcgtgcgcgaaagataattccacggaataccagtttccgcgctaatgtcacgcatacgctttttaacgctgtagtcactaaataatgcagccacacgatcgcgccgttgtgcatacaaatatttaattcgataccccaataagcggcggcgcggtccgaaatatgtatatacacgctcgacaataccagtatcaatcaagtgtttaattgtctcaggcaaacatccggcttcgtcatattccgctgataatccggttttctggcgtagctggtgcattgttgcgatgccgtccagttcaaggatattgataacttttgtttcaagttcaatgctcattgtttttcgcctcgttttaagcgcgaaaacagccaccagaaagaggtcaactttccggtaagccgtttgctcaagttaattaaaaagatgcgttattctggttatttcgtggggaaaatcggcttgctgccggacgttgttgcattgactgtatgcaggcggacgccgcgcgtgcctggtcgcatggtaaaatgttgccgttatcgtcaaaccgctggtaaacagtccccgttttcccgtgacggttttttgaaacgatgatctccatgtattcgcgggcaactgattgttcgttgtagtagccgtcgcggtagaccatgatgatccggtctgcgtcttgttcaagattaccggaatcacgcagatcagaattgttcgggcgcttgttcggtcgttcttcaacgcggcgggataattgcgccagcgccgccactggcacgcgcaactctttcgccatcattttcaatgaccacgacaattgccctacggcgagatcatgacgttcggccttagccagcttcattaacccgatgtagtcaatcattaccattcccaggttaggatgatcctgtttcatccgttcgacggtggcgcgtatttcctcgaccgttaactgcgatgcgtcaacaatccacacatcgagatcggcaagggcgctcattccctgggcgacgtgcgcccacccttcatcatcaagttttaccggattgcgtaggcagtcggttgataaattaccagcgccagcgatggcacgttcagtcatctgatctagtgacatttcaagcgtgaacagtaaaacacctacccgctgaccttctccgccagggtatggacgttcagccgccgcgcgggcaattgccaacgccaacgcagatttaccagatccagggcgtccggcgataagtaccagatcagtagcgttaatgcctcctaacatttcgtcgagtgggtcgatccctgttttgatgttgtcagagttcacgccacactccatgcgtttacttaacacttccgtgtactcctgtaccgcgtcgcgcaacagcaccggaataatcttgtctttcgttacttttaattttgaataccgggaatcaaaatatttcatcgtctccctgacagcttcaagtgtcccggtctccaggttgtagcgtatatcgtccatcagttccaacatctgccgccgctgatattcctcctgtaatagcgcggcgtaccccttaaggttggcggcagatggacacgatcgcgccgtttgcattagcgggacaaaattttcgttaccgatttcatcaccgaccatcagcgcgtcaataaggtttctgtttctggcttgcgcccggattatctcaaacgctcgtttatatagtggaatggtgaagacttcaggatcgagcgtagcaagaacatcttgcgcgttaggagtaagaccgcccaacaggaggccacctatcacagccgcctcccgttcctggcgtaatgagtttacttgctcagtcaccattatggcatttcctccggtttacagaatggaatattcagggtaataaacaaagcgcccgatctccccgtgatcaggactgtaaattattaccgccgccagccgccgcgaccgccagccgccattcgttgaataagcgtctttgcccgctaacgtgccgtggtactcaacaacgcccaacgatgattcaatcagccgttggtgatgccagtgcccgcaatgagcgtaaaccgccgatgacttgccgaaatcctcccgccagtcagagacgcacgcagccaacaaattttcgggttttttgatagtgtgcccgtgatgataggcaaggaatgttttgccgtactgtgtgtggtggacgatagcaggggatacatcaaccgtcacacgcggttcatcttcgtaaaaagccgccagcgccgcacgtagccaaatcatccctgattggtcatggttgccggataacacttggatctcgacgtctttatgatttagtaacatcttcccgaccgcccgccggacagaccggatagccacataaacaagttttgcgtagcggctatcttgatcaaggatatgaccgcttgttggtgtaaccgggatcatcccatcagaatgaagtagatccccacccaacagcaaaacagctttttcagacattggcgcagcgcctaccgcgtagtcaaagaaatcatttagcacgcgttcagcgatcccggtgtcgtagctctcaccgcattcagctttatgagcaagcgcaccgatatgaagatcgaataccggataaagggccaggcttttttggaaatcaatttcaggcactggcacggcctccgcgcgtggtatctcttccgtgaaagcgtcgcaagccgattgcattagcctttccatttcgtcgcgatcacgggatgttttaatccagcgcataatcacattgccatccttatcgactagcaatgactcgccattgacgccaaaaccaggtgcgcggcgcgtggatattaaaccgcgcttcgccagccttgcgcccaggcgttcgacgttgcgttttgccattccatattcttcggctatttgcttgtaagttttaccattcttgtattcagcgatcagttgttcgtcgctgatctttctttgtgacataacgttatttcctcaggtttacattttgtatatttaaccacaaacgaataatttagttatccatgcttggcccttagcagtgaataacgcttgctcatatccatcgaaagttaatttcatctcgccgtatcctttatcaataaaccattgactaaatacacgacgacgacaacgaagatcataaactccaacagcttcgagctttctgtttaatttaatcgcagacattcccagcgcttttccgacttctgaagccgtgcggtgcatgtcgtttttaacaatggcatcacagacagccgcttttggcgcaagctgtttattaaccagtgcaagccgttccttttcctcagcaagatcggcagcaaggcgcaacgcttcgcttaatgtttgaggaattgcaggagtgttttgctgtacccgtttttcaagttcaaaccatcgatcaataacagccgtccggcgcttgatgtcgtagccagttattaaaatctcagtgtatcttctatcgagaagatattcccagctattcggattgtttttatcatattgattgcatataactgattgatttgtaacgtaactcaaatctgatttacgaatataatcatcaggtttaccgcctaacaatgcagaaagcataacgcgaatatcacggcatacattaagatgtttcttaccagttaaatctgcaatctcacgcgatgacattgttaacacttcattcgcgccattaagcgccatcaattcagacattttattttctccgtaaaacgcgctacaacgcaaaaacccaccgcgtaacccacttgtaagggtgcagtgtcttttttgcgccagaagcgcaatcaggtggctaattttcgatttacagactggtaggtaggttatggattgactagaaggaataagccgccgaacaaagcgacattaacagctattgccgcagctatggcgaaagccagggcgaaaacgtgtttactatccattttaaaatcctctctgtaacgctctctaacgagctaatcgcaaaaaggtaggcaagtgtagcaccacatgcgatttagctcgctggtgaggttgttttgtgggtaattttggatttttgcggatcgtggttggtcaaagaacgccagcgcgcgtatcacgtagcgtttttggtttaagcaggaaatcaagtgtcgcagtgaagccattgccgaagtaaaaatctgaagccgtgtttttgaacgtttcaaagtaggcgacaaagccgttaatgcttttgtctttcaggtagtcagtgaacgcatagatcttgcgttcaagatcccgatccagttcggcaggtggtaacagaccgtcaaacgtgctgttaaatgcttccaccacgtcggcggcgtttacagtagctgatagcttgcgccattgttcagcatcagccagatacccatcgaatttagttacccggcaaatgttgataggcttaggtgttccaccacggctacgccattgcgttaaagcccactcaattactaacgtgatctcatcctccgtatatgccttacgtgtttttgtttctgtcagtagttcgatgaatggcttagcgtcacgacatttgcatcctgctttttcgttgtagaaggctaagcaacggtaagctgcctcgcttatctgaaagtaaccaccctgattgaccgttttttgttcattttcgctaatacacgaagtgtatatatctttttctatttcttcttctaattcttcttctaattctaattcatgaccctgacatgacccggtcatgaccctatcatgaccttttggcgttgggttgattaacttttctaatttgaattgttcttttgctgcatttatagcagctctgtaaccactcttagaagtcattgattggtccagccttttcaataactttaaacaagttatgtgtccttgagaacattcaaataaaccaatttcgatgaagtatttcatcatttcttctatacgtttttcagtagatccgacgtttcgcgcaatgattctcgcgtcatgtcgtaggtcaaaagtcagattgtgctgatctacgtcataagtaattaattcaaggcaataccagtaaagaccgtatccttccaggccataatcaagcaaaacgttttgaagtttttcgtcgcggttcgcatcgctatcatgcttaaaccacttcatagatcattcctccggcagcattaccaggtaaacgtcatttaccgggtaagggttacaaataaatcctttgtgtgttaatccgtcgatagcaaccattaccgtatttacaggaagttcacacatttttgcgatttcttggtgtgacaccctggcgtggcggcgattatccgccttttctgccaacgccattaagacaagtttttgaatcgggctgttaagttccactttccaggcctcagtcatcatgtgcatactcattgctttttctcctatggttaaaatgaacgcgagggcgggtatcccattagcattagatagcagtgactgaccgctcaacagatcccgccgttgcgtgatatttgtttttcgcttcacagcgacaccgggtttttaaagagcttttaaggtatgtgcctttttgtgctttccattatcttttttcttgcatccttgcaagtatggccttaccttgtctgcaagtttacagaatggagttttaagatcaaggcttgaaaaatacgttttgtgacttgcgtcaaactttttgaggttatagggtagcgacatgaaaacaaaatggtatgacttagcaaagcagcttatgcgtgcgcaaggcatgagccaggattcattggcggatctcatggggatcacgaaaggcggcttatcacactggctgaatggtcgccgtgagccaaatcttgaagacattgcgcggattatgcgggcgcttggtcgtcggcaattcactgttacacacgatggaatggtcatagatgattctgtttctaacacgttaccgggcgcgccaccgcgtgatttaggcagttacccggttgttgactggaaggacgcagtaaacaatatggaagatacaaggcgatcaacattaccacacgttacaactagcgttatttgttcagatgatagttattggctggtagctaaaggcgaatcaatgaacgcgccgcaaggattgagtataccagctgggacgatgatacttgtcgatccgcacgcgccagctattgacggaaaactggttatagcccaactggaggaagggcaaacgcctacgtttaaacagcttgttattgatggaggtcaaaggcttttacgttcgctcaatccgctgtatccgccaatccctatgaatccagaatctaaaatcataggtgtggtagtggacgcgaagatcgtaaacctgccataaatattagccgccggatggcggcctttctttgcccgtaaaatcaccaaaacgtaaaccaaaaacggtttttatcatttaaatatcaatgatatagaaaatattttaaaaaagtatacaaaatggattgactcggtatatcacagggcgtatattgcgaatcaaaggaaggaggcaggaaacaaaaagcgccttcctggcactttaaaaatcaggcttaacaccttgtcaaccgtggagtaactcccccgatgggggaccgaaagcggcactgataacaaggcgcatggggtgtataaagcgtcacatcccccacgaaaccgcacgcaaggcgacgagtcagcttgcttggagtgagcagggtcacaccggaaacggcgatgattgcgggattagttgaaagatgttaagccattctttaacaatctggtcagccgctggaagtgcggcaattaacgaagatgattttttattaagtatcatcaaggatataaggagatcagatcatgacagttacaatcatgtatggcaaatgtgacagtaaactgaatgccagggaacgcagaagaataaaaagagaaaacgaaagaaaatcatcacctgcaattaataaaacagacaatgtggataaagctattcgctttgcaaacgaggaaagatgcaaaccaaatagcattaaagaacgtcgcaaaggatcagtaaaatggtatacggaaaacgaaagcggcaactactaccacgcaacgcaaccacgccaactaggtgaaaaacccctggataaagtccgctaccattaatacaaaatgtaaacagcaggaggtgacattatggttatcgaggcgcttcaattcaaactggctgtagcggaaatgcttcacgatgccgaaatgtggagcgccgcgaataaagccttatacgtagtgttaacagcgaaggagattaaatagtgaaaacagagttacacaaaaagctgtggacgattcagcaaacgctgaacgcgccgaaaaatcagcgtaataattttggcgggtataattacaggtcggcggaggatattctagaggcggttaaaccactgcttcaaaatatcacgctgactgttagtgatgaaatcgtcctgatcggcaatcgctattatgtgaaagcaacggcgacactaagcgacggtgaagacgaaatatcggtaactgcttacgccagggaagaagaaagcaagaagggaatggacgcaagccagctaactggcgcgacatcaagttacgcgcgaaaatatgctttgaacggcttattctgcattgatgacgcaaaagatcctgatactgatgcttacgcgaaacagacaaatcaacagccgcgacagcagaaaaacccgccaaaacaacagcagcagaaagcgccgccaaatcctgatgaagtattagcacgtttctgtgatgcagcagcaaaagcgcctgacgctaacaagttacgcgagatcttcggcaagtgctggaagctattgcctaaggattcagaacaacaacagaaagcgaaagacgtttatgacattcgcttaaaagagcttaacggggagatcaattaatgagtttaaattcaatcacgctgggcgggaatatcggtaatgatatggaagtgcgctacacgcaaaacgggaaagctattggtagttttccgttagctgtaacgaatggctacggcgataataagcgggtaatgtggatcacttgtctggtatttggtgagcgtgcggaaaaattagcgccgcatatccgcaagggtggaaagatagtggtaagcggtcgcctggatgttcggcagtttgaccggaacgatggcacgaaggggacggcggtcgaagtggcggttaatgagttcgaattcatgaacgtcaaccaacaaggccagcagcaaggccagcagcagaaagcgccgccgcagcagcagaataataacgggaataatccgccgatggacttcgacgacgatattcctttttagaatcaatgtgttagcgatgagtgattatctaaaaccgccaccgccaccacgaacaaaagagcaagtattaaaagaagcccgtgatcaaatcgatcatgggctttttttatgcggcacggcagcggatcggatggcgaaaagatttagtgacctgtacgcaaagcaaatatggttcgacaactggcaggtaagtttttacccactgcaaagaaaaccggatatgcattggcctgaatatgtcgatccacgtatgcgcaaatatcgcggtcgtatgggccaggttattaacgattaatgaggtattaaatcatggtcgaagataaagaagtcgataaagaaatgccggacggtgctgatgatcttattacttttagcggtggtttgtatgaattcgaaacgtctgcgggttggcatgatcactggcactttccaacgcgcaaggaattaagcgaacgtaaatcatttggcgaggatgccgaacgactggcgaataacaaatggcttgataaattcattgcggagggcgggaaatgaatcttgcaaaaattgccgcattgcttgcggcggtagcggtggcggtgctgtatctcagcgtatcgctttatattacggtggcgatcataaaactgattactaatatgtgaggctaattatgaaagtcagtaaggatattgcaacggtcgcgttttgcgttatttgcttcctgtttacggttgtcttttgtggcgcactggctgcggtgattggccttattggtaaaggggggatgttatgactccgtggaatgcaaaagctggtgatctcgttgttttgcccgcatatcgtagtgaccctgggctggtcgtgctgaataaagcatgtatagaaattgagcgcccgatccttgttaaatacctggacggaacaattatagagccgatcttctttgacaagattgaactgaaggcccgcaatgttcgcgttaagccgttccgggcttatgttgaagaccactggcggaaattgttcgccggattgaatgggatgttcggcgtatggctataaaattagtgaaggttaaacacctgaaaggcggcgaaaaactccgcgcgtggttcggatatgaatttattgctactgccttttattttgggccagggggccaggtgacaatttttgatgaagaatacgacgaggttggacaatggcatcttgagcaatatgtcgaggtgttaaatgaaaattaaattccataaagcatatgatagcgcgacaaataagctatcactatttatcgaattcgaacgccggatcgttgttgtaccttattcgcggcgcttcaatgacgctggcgggcggcgacaattcgcgatcgatatgctgttacgcggctgcggccttatgcgcccgctatctgatttgaaacgaatgatgcctggatcgttcggtcagattgatgaaatagaaataagccaggaagaactgaaacgggagcgtgatttattcctttcaagcgaaggaaacccgtttaattcagaaacagaaatgaaatggcatcaccaactataaaaggataaatatcatgaacgacatcaaaacagcttattcactcggcagcgatggcatgttaatcactcgctacacagaagacgcaagttttcatgaagtggaaactaaggactatcacgaagtattaaaagatatggaagctggagcgtatgacgctgatttgaatctggcgttacagattgttgatattatgatggacgcatcgatccgcgattatgtgtctttaaacgctgaagaaaaaacggctgtagctcgttatgtcttctgcctcactttcgtgaaacgaatggaagaggactatggtcgcgtaccagtgccggaagaaatggacccgctggcgttcggaagtgctgttatcttcccgttagatgaaaatcatatgggtagcgttgctctgtattctatgcgcggcttaatgaaaagtatctttgaggctaaagcactacagaagtgcattgatgaagggcacaacgaggaagacgtaagggcgatcatgccgttgttttatggcgaaatggttggtaataacatgcgtgcaagtgatttaggtgtgcaggcggctatcgctgtgcttaatgatgcacggaaaaacgcacagacgatgcctgaacagggaaaacgtgtactgcattaaccgagtgattccgatcacataaatatacattttgtattgtgatcgcatatccgttttgtaagccaaaatcaaaaggtttacggtgcggaggaagcaaaaatggaacgcgaattcatgctttattgcgtagaaggtggcgtaggtcatgatgcctacgtcgccgggaaaagctatccagccgatgaagtgctttctaatatgcacttcagggaaaatgaaagccaggtgtctgtgtggaagcgatgcgttgatggaattgagatcgttagccttgaaagatatttaggtaaattcgactacggattaatggaggcttaacaatggacgacacattgctatttatgtgcatttgttgggggtttattgctttatgtttatttgttagatggtttattgaataccatatgaggtgatatatgaaaaaggttggcgaatacatgataccggataacgctaaattagccgggatcggtcaatttggctgttattactataacagtgtcggtgatatttatcaggttagtcttattggtggtgtgcagcattttcgtctgatgcactttgaattaagcgcacttaaaaaggcggtgttaatgtatgaagtttaaacactataaagaatggaaaattccagaatcagcaacaaaggcagcgccaggaaatttttctggcgtttatttttatatggatggcaaatggtatttcggcagcaggccagatcactattatcaggaaatatgcaagcctcacgtttgggatattaaagagcgtgtaaaagacggggtgattgaggacgtttaaaatggttaagagctttttaaactggttgggagcgtggcttttagctacgctttttgttttcctggcgttcatggctgttatcgttgttattatgctgggggcaatgtttattacgtggtcactgcctgaatttaacgaaataggcgagatccttgccgcagggcgcgctttattaacggttagtgcatttatcgggttttgctggactgccgcgccagattgggatgatcctttttaattatggctttattcaacctgtcagagccgcaattcaacgccgtaaaaactgccgcacgcgcggcgctttctgcctgcaaagcggaggtagaaaagaacggatacagcgataaagccacgcggctgatactcgacaagcattatcgcaaggtcgccccgctaattagcattgagcgttttgtgtggttggtggggtatctaaataaccgctgggggactgatcaggattatttctaagggggcgtaatgaaaaatgattacggcggaagccatacgccaaaagaaataaaggacttatggcaaacgccaaaaccagtttttagaggaatggatcgtgaattcgaattcgtcgcggatgtggcggcaaacaaggcaaacgcattagttccgcgatatataaccgaagagatggacacactccattatccgtggggagcggtggcaatgcctggtgagtatgtctggcttaatccaccatattctaatccggggccattcgtagataaggcagcgatggaacatcaccgaaatcatattggctgtgtaatgttgttgccagccgacatctctgttaactggtttatgaacggcgtggagacggcaaacgaatgccgattaatcacgcgcgggcgtctggcgtttatcaatgctgcgacagggaaaccagcaagcggaaacaataaagggagcttgttcttgatctggcatccacggtgcagacatgaatgtattttcacgcagataacacgtaaagagctatatgcaagaggtgcagaaaatgactagtgcggctgatttattacgaattgcagcggaaacaatcgagcaaagaggtaaacaaaacggctacgacagaaaagaggaaaaatcagcgccaaaaatagccactatatacaacgctaagaagggggcaaatttaaccccacttgatgtatgggatctattgatttgtctcaaggaggcgcgattagaagccattttgagcaataacagcgatccgacagacacgttaattgatttgattagctataacgcgctaaaagcggagcaaatattaacggagcgggaggaagaacaaagaaagaaacaggctgtttttgatatgccgttaaattgcggctgtaagaaaacgtcaatcccaggcgacttgatcgccagtggtgaagtaacaatgaatggcagcttccaacttgataacggctggcggtttaataaagaggctttattgtatacacctaaggatcataaagatgaaaagggtgatgattgacaggttactggcctgcgtttatgtcgccgttttcgtgatcataaatcttattgttaaccattgcggcccgtgggtaattccgatcaccacggtagccgccgtgtgtgtcaatatgatgatccgtgacttcctgttatatgacggcggcctgaaatggtcggctacaacatgcgccgccgctggcgcaatcactgtgctgataaattacgacgccggaatggtggcgatcgcgtcatttgtcgcggttgtttccggtgcgcttatttctggtggcgtttaccgggttttacctggtgatttcgattcaaaacgatggcctgcaaatatagcgtccgccattggtgatgcgttaattttcccgacgctatcgtttatggcgtttatgccggaaatatcagcgatgcaattcatctcaaaaatggcagcggtaacggtgatcaccatcatcatgcgccgctatttcacgtttgagggcagaaaatgagcagggctaaacattggttaaataattggcttagaaattgggtggtatggtcgctgtacgacggcagcgggtacgccgttaaagattgggcggacgctggttataaatgttattgcttcaactatgacggcgctaatcacggtgattatgacggtgtaaaaataattcatccaaatattgaatatgttaacgtctggattgatagccattttctggtaatgttctcccctgaattgtctgtatatccagatcctgacattatcctggcttttcctccgtgcgatgatctcgccgtgtccggcgctcgctggttcgctgataagcggaagaaagacccttactttcagcagaaggcagcgtataacgcaaagttagtagaaacgctggcgagtatgtataacgtgccgtggatggtggaaaatcctgtaggcgcactgtcaacgttatggcgtaaaccggattttatcttcaatccgtgcgcttacggtggctacctgccggaagatgataagcatcccgctttcccggaatacattgccgaccgcgacgcctacacgaagaaaacttgtatttggtgcgggaatggatttaagcagccgctattccgtcctgtgccgatgccagatgaatgggaagacagtaagcagcacgcgaagttaggcggaaaatcaaagcgaacaaagatgatccgctcactaacgccgcgtggcttcgcccgtgctgtattcctggctaacgaccgggccatcaatcgtactacgctcaaccgcgttttgccggactgaagtttacaaaatggcgtcattgtgtgatgaatgtcacataatggcgctttacaccttgttagcacgtatccattttgtatacttcaagcaaacaaaatgctctttaaaaatccggcagcgctgaaatgcgtagaaatcacctgaaaaggagagagcattatgccttttgataattaccaatggcatgacgactatgaacgagaaagcgttatgcgtgcaatgtgcaatgtatgcagcacgaagaaaggaggctgtaacgagtgcaacgaatgcttagaacattggctaagggccggacacgccgaaaggctgaacgaaacagagaatcaaaaataatcggggtggtttttatgcaaaaccctaaaaaacccataagacgccgttgcaagtgctgcggcgttttttttgagcctaaatatcataatcaaacgtggtgcagcgatgaatgtctggaagaactgaagtttgaccagctatgccgcgaccgtgagaaggctatgaaggctatggagcggaagaaacgccgtgatagccagagggaagaacgcaaccggaagcgtaaacagttaaatccgcgtagttattggatcaaacaagttcaaaatgtatttaacgcctatattcgcgaacgtgacgcgcgcttgccgtgtatatcttgcgggacttactacggtgagcaatgcgggtgggatgcaggtcattacaggacggtagccgccgccggacatcttcgctttaacgaggataattgccataaacaatgtaggcactgcaaccagacattagacgggaacataggagggtatcgcccggcactgattcgaaaaattggcctcgccagggtggtggcgctggaaaacaacaatgatacgcataaatggacgatcgcagaatgtaaggagctaataaacatctatcaggctaaattggacgccttaaggagaaaggcagcatgaatgaatattcttttagcctgccttacccgccatcgaataatcgctattaccgacattcgcgcggttttcactatatcagcaaagtggggaaggaataccgggagcaagtaagagacatcatcgagctattaaatttaaacattaacctatcttgccgactggcaatcgccatttatgccgcgccgccggataaccggatcagagatctggataatatccccaaatgcctttttgacagccttacttatgccggattctggaccgacgacggtcagatcgattctataaaaattgttcgctgccggaaggcaaaaggcgggcgattgtttattaaggtacgcgagcgcgaagacctgttaccggatattgacgaatacgcgactaatatgtggggtgagcaatgaaaaacgaaattaaagatctgcaaatagatattcagcgtgacgagcatgatttagctacagtccgacaaatccaggcttttcatatgcgcgaattgcttgcattgaaagagcttgagagaaagttagttcagtctatttctgatcgtaaacaccttattgctcgttacgggggcaaataatgaatctggaatcaattcttaaattccacttcccgaaatcaccgcgtttgtcagatgaaagccggggaacgtccccggatgcgcttaatactactgatgcgctaactgccgcaggaatggcgcaatcgcgcgtagagcttggctatagcgcttttttagggaagatggaactatcacaagccgaaaaacataaggccgtagttttgcttacagagcgtttaagggctatggcaaaagattatgaatacgttatggaactggacgaggccaaacgcaatgatctcattattcttgttgccgttttcgcgtttcgggattactgccagagtgcagcgaccgaaaaagtttgccctacgtgctgcggtcacgggcatttaccaaaaccatatggcgaatacacatcaacaatttgcgcacggtgcggcggcaaaggctacgttaaaaaccattgccaacgttgcaaggggcgcggcgaagtaccggataaaacagccagcgaagcggcggaaatgccagtattcaaaacgtgccagcattgcggcgggcgcgggtactcgcgtttccctgtagatctcgtccggcaggcggttaatcagcttgtttttccggtaagccgatcaacctggtggaagaaataccgggttttctatgaagacgccatagcggagctattcaaagaagaggcccgcgcggaaagtgagattaaacgagtgacacggggtgaataatggataagctggaaataaacgatcagtttgctgttatcttatttcaagataaaacaggcggcgcatggtgtaagaaagtcactggtgcggaagcgcgtttaatattgggtatggcaagcgcgttaaatgaaggcgaattgccagccatccctattaagcctgtcaaaatttacaagcggggtgatgatcatgaaaataattaatattggttggttgtattgcgaaaactgcgacgacgacggcatggtcgttaagactgaaaaaggctgcggcttctttctgtatcaaggagataagtttgtttgtccgcgatgcggtggtcatggtgagatagaaattattgaagataacgccgcagcgccagagccagaacgcattgttcttgatgaaaaaataaaaattcatcctgatttattacaacaaattatcgatcacgtatcggcagccgcaatctacagtgataacaattatcagcgtgaaatgaacgtcaagcgtgcgcttgagcagtattttaagggtgacgatgatgaagcctaaattaaaagaacatctatttgcaaagctggttaatgatctgacattatccgcgcggttgtgccgtgatacacaacaattgagggcgtggatagcaagggatttaaaaaaatatattgagcctggcgggcaaggtggcgaaatgactatggacaaggccatcaagcgccgttcggctgattggtcagttagtaatactgggttaaccggatacattgaaggctataacgactgtttacaggatcatagcgatgaaaagtaaacacctgcatttaaatttaaaaggagaatacttccacgctatccgtgcgggaaagaaggtggaggaataccggctttataatgattattggcgtaaacgcctggaagggcgggaatatgaacgcctgatcattaagctggggtatccagccagccacgaagcacaccggattataaacctgccttattttggctatgaagttaaaactatcacacatccattgttcggccctgatcctgttaaggtattcgcaattaaatgtgatgtgaattggatgctaagaggtgaaaatgaaaagtaaccgtaaacgccttgtaagggcgtacgacaaagcattaaaggcttttgatgatctacgacacaataaacgccagcgccgcaaatgggcgcgtatgcttgtttatgagtggcattattctgatgcttttatggaaagtgcgccgctattaacacaagaacaagccgacgaagtagctaacgataacgtttattatatgatgtggtgataatatgaaaagtaaccgtaagcgcatgataagagcatatgataaagcgttaatggaatttgacatactaccacgcagcaagcgccaccgccgccaatttgcgagatatatttttcatatatggcacgatgctgatttcttttttgatgccagatatataacacaggaagatgctgataatatagcttacgataacgtttactacataatgagtgagtgtaattaatatgcaaataatcattgattacctttgccacgctgtaaatactcttttcggtttttatcaacaaccattcctcaaagaatgggatgatatgctaaatgacatcctcgataaaggcttaataatggaggttgacgagcttacaatcaaatttaattatgatggtgaaatttatctaatttgggtcgggaatagatggtattcatacggtcatatttattcaattggcaataaatacattaaaagggggcaagaattcagaccacgcttccgcacaatgcgccgcctgcataacctgcatataaatctatttgaagatcaggaagcacgggaattattcaaaatttacgggggtaaacaatggagttaaagatctggtgtgctattgatgttgttgacaacgaattaagcatgtttgcaactgatggaaagcgcgtggtgatcgctacatggacgcgcaatcatgatgatattgtttttcgtcgcaaggctgcggagtggcttttctctgatgacggctacacgatgaatatcgcacagcttgccaggatgaaagatgaaatactgactgacagctacacaacagcgtaacggggtaaatatgcgtatctatgagcacaagcgggataagacccgcttttttgttcgtgctggcgttgcgtaccagtatcacgaatgcggatatattgaggcgcttgcttacgatctggacttcgaacaagaaaaggaatggtttgattttaaagtttaccggaagcgtaaaccgtcgcgcgacgagcgccacgctatccgggactttttaatcagcattgaacgatgggatacagagtaatgagagcgaagaaaatggcagacaagaaagcgttagttattgccacaacggatgtatcgttatttacgaagggcgaagaaatagatcttaaattgctttttggcatgtttgagccacacgaaaagccgtggttcgtacatgaagataaacaaggcaatatgcgcgttgtagtgccggacaaaaacagcgacatattttttgctattccagacccattacatgacggtgaaatgctggcggtattgttggtcactgatgctgttacttacaagggaaaaaaacatgaaagttaaattcttgcacgatcacggttatccgtcactgaaacaggttgttggtaaggtcgtgaaagtggttcatagtgataatgttacttgcatgattaacggtgctgatctaatagccgctggcgctgatgaccattacatcaatcctgcgtggtcgtatacgttcagccttgccgacttcgttggcgacaaggggcgcgggctggaagtagtcgagggttaacatcatggacgtttacgaagatctatacctccagacaaacactcgcactttttatttcctgaaaaacggcgtcgtatatcgcagtgacgacggggtaataatgaaagagtggttattcaagcgtaaagacctactcgacgatctggttttttccgggatattccgtaaacgtccggctaacctggaagaagaaatgttgatcgaggtaattaaaaatgaaaatcagggtaagttatttccgggcgaaagataaggcaacaggaaagcaggtggcgatcctggttaacgaggccaattacatgtttgtgcttcagccgtggtgcgtagctgactataacgataattatcgtcgccacggcgtgcgtggtgctgtaggcatgaaaggctggcaaccgcgcgacatggaaagctattgtgaatggaagctgatagcaaaatacacggtcgattataaaggggttttctgattatgtttgcaagatgtgtttgttctgatactccgttctttactgttggggagtcatacagcgttgagcttcttaatgggtgcaagcgcggtgctggcggtattcattatgtaaaagataatgatggcgatgcgtggcaattttacggcgatcatgcaaaaggggttgttaagggtagttttgataatcgtgtaatggcgcgtttcgttaagtggtgaggtagtgtcatgagccggaatcagagataccagtgcacatattcacgatgtagcgcgttttttaagaatggcaatatctacgaagtcggcgcggcattggttgacgcaaagaatcaggaatatattcacgccattactgacgaccagggccagctatggcgcttttacaaaatggggtgcgggacggcgcttgtttattcccgtgctggtggtggtgcttttgctgcgttttcgtatgtgggggtatgaaaatgattttaacgtgtcacggatctgatcttgattgtttcgaagacggttgccagtacgaagcggaaaagccaggcggattaccaaaaaatccgtttttagtcgttacagacgcttacggtcacttatggtatgcagcgcccagcaaggcgcgcggctggtggctgattcagaatgacgatcgcgatgttgtagttgccttcagacaggatgaataaaaagcgtgatctactccgcaaagtatacaaaatggcattgttacggcagtgccgttttgttatatataagtcaaggaaagacggaagtggagacaagaaaatgaacgcaaacgctaaatatccggcctgggtctttgaactatacgcccgctattttgaagaactggcaccaggtgaagaagcattaagcattgacgaatacgcggagtgtttaggattcaagggggacgaagaagaataaaacacggggccggatggccccatcaaaccagaagggtgtaattatgaaaagcgctaaatttattgcttgctgttttgttgaagtccctaacgatgatgttttctgcaattatgaatttaaagacagcttaggcagatctcatgttgttgttggtaagcgcggcgattggttatatataaccgatgacgatatgatttttaccagaaatcaactatttcacatacactcagtaaataattatgcgccagttgccgctatatccacaatggatatgcattctaatatgtggcttgaaaaggacaccgtgcataaagcgcgtagcttacctggtgcggagtattaattatggttgtatttagactatggcgcggagttagtaggcttgatggtgaatacagccgcgttattgaagatgttaaccgtgggcgtttttatgaactggcatacaatgaggaattggaaaaaacatacttgaatgaatctctccccatgtggcgaaaaatggctggtgaaatagctttcgcaatgctctacgggttttatacagatcataacacgctaattgacgccgaactggtgacgactctttacgaaggagaataaacaatgactaaatttatcagcgttaaagttttccgtggcactatttcagaagatgaaaaaaatggcaaattcgccgggcaacctggcgcatgtttccgtgtagccactgaagacgacgcgcacgttaaatgctttcacgtatcggagccgccttttgatgcaaaacaccttgaagatctaaataaagtcagaggctttgtttttgcttcgctggtgcttaatcctttccctgaaaacgaagtcgaattaattggcgcggaaaagatcgctgaatacaaaataacagaatcggaagacgggggatcgaaaattgagcggattgtataaggtgtacaaaatccggtgtaagggcgaatacctgggctttacaaccggatgcgaatacctgggccacattgggtacggccctttcggtgagttaggtatgaatacgattgatgacgagggcgacagccggacgattgatcttgattctgatgatttcgaatacatcccgccagtgacttaccgtgctgttgatgatttcctggctgaacatgaagacgaggaggatgattaaatggaagagtggtataaaattttattaatcatgtttctttctgaaaattgggcgctatttgagcgtttttgcgaggaacatggtgaagaccctaacgatatttatcacgatcttgggggtgaagatgattgaatgccttattgctgtgattgttttgctttatatcgctggcgcgatcctgatgtcatgttttattaagtttagcggtgccgaacctggtggacttgagattcctttttggcctgtgactgtttttatcgctttcttcgacgctacggcagagcaaatcaggcgagccattaaggagcgtaaaaatgggaaatagcgaccatgaatatgatggcgtttatcagtcattggctacgcgagcttattaccgcctcgaaggtgagcacgttttgatgcgcctcggtagtcttgatcggtggcatgagccatttttacctatgacagcgaaagaagttatcacgatggttaatcatagatactggcgcaaggttggtgatttgtaaccataatcgcgcataaaaaacaaatagattaaaatatttcctaacaatgcgaaattgtaattacccggcaccgcgccgggtttttgctttgttggaggtaaatctatgttcgacagaatacgggaggcgtgcgcgtatgtgactggggccgtaactgcttttttcggcgcgataaccatcaatgatattgccgtctttgtgggtatcttatcaaccataggcacatttgccgttaactattacttcaaatcacaggagaacaagcgagcgcaagaggaacacgacgcgcgaatggggaataagtaacatgattagccaatcgctgaagaataagattattgctgcggcggctggtggggcgatcgctattgcggcggtgatggttaaaccattagagggcgtggagtacgatccctatcgtgatgttatcggcgtatggacagtttgctatggtcacaccggaaaagacatcatgcttggtaagacttacacgcaatcagaatgcgatgctttgttaaacaaggatctccacaaaaccgcaaaagcgattgacccatatattaaagtcgaaatatcagattttacccgcgcggcgctttattcattcgcctataacgtaggcgctaccaacttcaaaacatcaaccttattgaagctactcaatgacggcaagaaatcagaggcgtgcgcacagcttaaacgctgggtatacgctggcggtaagaagtggcaaggcctggttaaccgccgtgatgttgaatatgccgtttgcgaatggggtgaaacatggacaaggtgaagacggtaattatcgccgctatcgtttgtgtcgttgttgggcttgttgccgcgcttagtcactgccagtcagtgataaacacaatgcaaagcgagctaactactacacagggcgcactaaaaacagcaagtaacactattcagcagatgaaggagcgaaacgccgaactgtcaaaacttgataagaggtatcacgatgaaattaaagctatcagatctgacattgctgatctgcgtgctggtattgatagcggtgctatccggttgcacgtcaacgcaatacccgtgcgagtgtcagacgccaccggaaccgccagcagcattgatggagccgcctgtagactcactcccgacgctgaatcggcttatctatccctcagagaacaactaaaagagaaagacgcgaagatcaccggattgcaggactacatcaagacgcagtgcatacgcaaagaataacagcgcgtggacgtgtcgccgtttccgccagccagccataaccgggccaatccttcccgctagcgacggcggaaaagtcaaaaacacgtaataccggatcaacagtcccattaacaggtcggcgctacctgggtagaagaaagcgccattcaccaattttataaaattctggaaacggtactgatgaagcgccgtttccagtgttttatagctgttttcactccctgcggtgtcgagttttgcgggggttatatttttcagaataggagattattctgatggctaaggctaaaggcattaaattgcctcaattcaaagtaccgctctttgagcatacaaccgttttcttttgcccgacccgcgagatgttttatgaattttgcgaaaaggcaggaattccgatcgaacctgatttcgaactggcaggaggattgacgcttacttgcactggcgagaaaggcggtaacttctacgtgatcgcagtattcgacaatgagttaggaacactggtccatgaagcggcgcacactacatttcacgttttaagcgatgtaggcgtcgtggctaccactgatccatctcatccggcgaatgagacttacgcttacatggtaggccgcatctttgatgcatttttccctatcctggcagaatcaaacgaagcacaggttgcagcaatgcaggcggctgaagtcgttgagcaggcattagaacaggcagaacagccgaaggaagaagaaaaaaccgcgaagaaaggcaaacgtaagccgaaagcaaaagaagcgcttgtaccgcgtgttatgagctttaaacgggggtgattatgattgcatcaatattaacgtttataggcggtatggcggctggattcattctttgcgtgtttttggtggctatgtctatgcaggattgattatggatgattatatcattgccggattgatcggcatttctgtattcctggtgtgttttattatagctgtactgataaccgtaaaaagcaaatcatgaatgcctacgatctcatttggttatttgtgctcatcataggtattggcgtgaacatttacaggctatggtgaaaatatgattgacccgctcattatcctttctgcctgcgtcgctgtatggctggcgatcatgatattcattgaaagctgaaggtattcacatgagtgtttacgatctcatctggtggtcgttggtcgccgtcattatctatttctggtggaagaatgttgtataggtgacggcatggatatattcgaattactggcgattatgtgcggcatgatgttaggcgttgtcgccataatcataatcattggtctggttatgggtagcatcaaatgaacgcatacgaaatgctattgctggtggctgttattacagtaattgccgttgatttttatcgagggttaaaaagatgagggaagcagacttcttttgcatgattatagtgatcgtcatcgttgcggtgcttttaagcgttaactgaatcgcaggagttaaaaatgaaatggcttgatttctttttcctgattgttgctattgttcttaccatgaccgcgctaactcaataggttatagcttggacgcgcaatttatgcgcttcctaaattcagcaagtaaagtaaaggtgatggcaacaatgaaagaattattcgactggttggaagtattaacatactgtgcaagttttgttgcttgcgtatatatcatcaataaatattgagaggtgaaatatggcccgcactaaaaaggcaaaggctgacgataaaaagccagccgctaaaaaggtgggccgtccgcatggttataccgaagaaaaggcgttagaaatctgtgaactggtagcggacggtcagagcgttaacaaaatttcgaaaatgcctggtatgcctacccgttccacaatcctgaaatggtttagagacgtgccggaattctcggacatgtacatgcgcgcgaaggagatcggattcgaggtattagctgatgagatcctcgatatagctgatgatgctaagaacgttgataaagaccaactacgacgccaccaactaatgattgaaacgcgtaaatggttactggcaaaactgcaaccgcgtaaatatggcgaacgcgtcacacaggagatcgtcggcaacaaggaagaagcgccagtccaggttgaagtcacgaaagaagagatcgcccgcatcgtccaggaagtagaagacgaggtgtgattatgttgtcgcttaaagaaaggattatccaatccaaatgcgaaagcgatggcctgttcttcaaccgttatttctacaagcaagcaaacggcgcgaagatgttaatatcaggccatcaagtagccatccatgatgcgctacaacgtgttattaatggtgaaataacccgcctcatcattaacattcccccagggtatggcaaaaccgcgatcgcaacaatcaatatgatggcgcggtccctcgcaataagtccccgcacacgatttcttcacgtttcctattccgacaacctcgcattactcaattcgtcgacagtcagaaatatgatttgctcgcaggagtaccagaaattatggcccatgaagatccgtaatgacgccaattccaaatcaatgtggtggacggaatatggcggaggggtatatgccgcatcatcacacggtcagattactggttttcgtgctggttacatggagccaggctttaacggcgcgatgattatcgacgacccattaaagcccgctgacgcttactctgatgtaatgcgggataaagttaacactaactacaacgatacgcttgcttcacgtctggctgtgcaaacaacgccagttatcgtcattatgcagcgcatccactacgatgatttgtccggctacctgttacgtggcggtagtggtgagaaatggcatcacctttgcctgccagtgaagatcgacaacagtcttgattattgggatctgtacccggaaaacgaattcgctattcctgttcctcacaacctgccggacggctggctatggttgcataagcatagtgataaagatgaatcaactcttaaatcacatcgccgaacattcgaagctcaatatatgcagcgtccgcgcaagttcgatcaagagggcgcattgtggtcggaagcaatgataacagccgcgcaccggatgcagataacgcaggacaagatccgcacggtgatagccatcgacccggcaacaacatcctctgatgagtcggacgaaaccgggatcgtggcatgttccgcatatggtggcggcaagtatgctcaatactcagtagacggcgactattcaggccgcatgtctcctaacgactgggcgcaagcctcaatgaacgcttacaacatccatgaagctgacgcgatagttatagaaaccaaccagggcggcgaaatggcggaggccacgctacgtaatgccggattcaaaggccgcattgttaaggtgcacgcaagcaagggtaaattcgcccgcgccgagccaatatcggcactgtatgcacaaggaagggtggcccacactggcagcctgtacacgctggaaaatcaaatgatggaatacgttccagccaccgctaaaaaatcacctgaccgcctcgacgcaatggtatggggtatcactgaattaagccagccacaggcaatgggcctcatgttacctaagcgcctgcgcggattttaaaatctgcctcacaatccctcacgaatttttctatttttcgcgtagcaacgcgtaaacatgtattcaggagtaaacattatgccatccaatttagaattggcggttaatgctgccttgtcacaacgccaggcggcctttgcccgctatgcagccgctaacccattctcaatgggtattgatgcaaaacgtgacgctgcgtggagtgaatacggattcaaagaagaaatcacctatgaagatctttacaagctgtatcgtcgcggtggtatcgctcacggtgctattgagaagattattactacgtgctggcgcaccaggccaacgctgattgaaggtgcggaagacgagaaagcagaaacggaaacgccgtgggaaagagaaattaaaaagcaatttgataatcgtttctggcgcgtcatagctgaatgcgatcgccgccgcctcatcggtcgttatgcgggcctgttaattcatgtcagagataatcagccgtgggatcagccagtaacaaaaggcgtaggcattgccaaattcacccctgtgtgggctggtgctcttactccgaaggacttcgaagaaaacccggataaagaaaactatggcctgccgacatggtgggaatacaaggagcgcatcaacagtaagactatagcaagaaagattcatccagaccgtatctttatcttcggtgattattctgatgatgctatcgctttcctcgagccgtcctataacgctttcgtttcgctggagaaagtggaaggcggtagcggtgagtcattcctgaaaaacgcagcgcgtcagcttgctatctcgttcgataaagagattgatttccgttccctggctgcaacatacgattgcgacgttacagagctacgcgagaaattcaacgaggcagcagcagaaatgaacagggggaatgatgtgatgatggcattacaaggggcaagtgttagcccgctggtgactgccgtagccgatccatctgcaacctatgacgtcaacctgcaaactgccgccgctggtatcgacatcccgacgcgtatcctggttgggaatcagcagggtgaacgcgcatcaactgaagacctccgctacttcaataatcgctgtatgacccgccgcgaggaaataggaggcgagcttgaggaactattccgcaagatggcagatctccgccttatcagtatgccagtcgatgtatcagttttatgggatgaccttaacgccatgacaaaagctgagctactggaagcggcacacaaaatggcgcaaatcaatcaggcttgtcttgctactggtgaggaaatatttagcggtgacgagatccgagaagctgccggatacgatggcccagctagtgaagtagaactggaagacgaggaaaacgatgatgaaggtgaagaaaataatcaggcgaatacctcccgccgcgataatgccatctaacaccgaagatccgaccatgacaggtaagttacggtcgggagctattaagcgtttcaaatcctgcctgaagaaaatagccgatccatatatcgccatactggacagaatacaatatagcctggctgttaataaaaaatacaccttccagatttacatggatgaattgcacgacatgctggaggacgccagcgacatgattgatgagatattcgagctaaccgacccggaaagtttttggttttggcaggaatacgtgaaggtggcatatcagcgcggcacggcacaggaatacgccaaccttgccaaccagtctgttacttactcaagcgcttatcctgatgtatccgccgtgctatcaagtacgacttaccgcacgcgccttgcccttgttcgtacccgtgtatttgaggaaatgcgcgggctaacagcacagatcaagaaggatatggcccggcgattaaccgaaggtatggcccgtggtttaaatccactggaaatagcgcgcacattgcagcaggaaacgcaattgccgctatacaggtgcaaacgtattgcccgaactgaaatatgcacagcgttacgcacagcacgtatggatgaggcagaagcggcgacagaagagcttaatctgcgcactatgcaaatgcacatttcggcattgtcaccgactaccaggctatcgcacgcgcagcggcacgggaaaacatacaccatagatgagcagcgcgaatggtggagcagatccccaaattcaattaactgcaaatgtagcacgattaccgtattggttgacgaagacggtaacatattaaacaaacgaatattagatcgggcgcaagaaaactataagattgcgcacgctaaatatggcgaagattgggagtaaaaccgtgagtaaagaattgattcaggttaataccaaattaaccgctaataccatacgccgtgaaacatacaacggtcgcgagcatatcgttgtcccgtcatatacactaccatttaacatcgtaatgaatcgggaatattacccggaagctgaaattatcgctaattaccagtcactggagggtacgcttgccccgctgggtcatcctaccgtggacggtaaatttgtttccgcatttagcccggaaggattaaacacgggtttttgtggagcgtggaacagaaacgttgaattacgcggcaaccgtgtttatgtggaaaaatgggtggatgtggaaaccgccagccattcagagcaaggccgcgaattattaagcagacttgaagcactggagaaaggagaaagcaaagatccgatctggtcatccgtcgctgtatatcgtcaacgtatgccagctactgaagagatgaaagcccagggtgccgaccatgtggtgaaaatcatgtctatcgaccatgacgctattttgctgcatgagccgccagccgcttcaccagagcaaggcgttggcctgatggttaatacagaccaggcgaaaccgttaatggcggtggcaatgaaagaaaacagctaccgcacacttgagaaacaattaaccgacgccgcgcgggaattattccatgatgccgattatgtgtatgtggtggacttcactgataaagaagtgacgatcgccactaatactgaaagtgctcaagtttgcgcatatgaaaaacaggctgataaaattattctcaataatggcgagcttgcaaccaacgaggaaagtaaatcctggtttactcagttcgctgaacacctttctaatcttttctccctgaatgaaaaaattaaggccaataaatcggaggacgatcccatgcctttgaccaaagaagaacgcgccgaactggtaaaagaaattaacgaaggcttagccgcaaatatcgctaatgcagtagcagaagcattaaaaccagtgcaggcaagcgttgaagaattacagaccaatcagaaagcgatcaaagaagagatcgcagcaaacgcaaataaagaagaagcagaaaaacgcgccgcagttgcgaaagtacacggcgaaattgttgctaacgcattaagcggcgatgcgctcgatgcaatgtttaaatccctgggcaaagcagcgcctatggctaccaacgcagcaagcgaaggtaaaaaaggcgaagtaccagactttaacacctatttctaattaaaaggggatcacaatgtttcgttttcgtcgtgtaaatattgatggtaaatccattaccgaaacctatgcagcaggcgaagaagtattgccgggtaaactggttaaactggttggcggtaaattcatgaacgcaactgatgcaggaggccgcctgtatatcgttaaccctgcattccatgaaggcaaaaccattgctgatgcgatcgcagcaggtgaaacagtcgtagctgactacgtggaagaagggcgcgaattcgcaatgcgagtggaagcggcaacctacaaaaaagaccaggccatcaaacttggtgatgtaaccgttgcatactgccaggaagatgtaaccctggaagatgtcgattttatccgcgttcgcgtcgcttaatttaaaaggggaataacatgtactttacaaaacaaaatttagccactaacagccggatgcaggcgcattgggctgaactgtgggcgcaacgcaatatcttcaacgaccagcatgacgccatgattgcagcaaacaaagcaaacatgaccgctgaaatgattgcttgtaacgccgtcggtggttttgaaaaatcattctggaaagaaattgataaccagattatcgaactgaacaccgaagaaatcggcattgagatcgtaaacgacctgatggctgtgcagactgtactccctattggtaaaacactgaaaatgtacagcgtatccggcgacatcaacgatgaagtcgtaatgtctatggatggtcaagcgccgcacggcttcgaccacactgaatacggcagcgatggcgacccgatcccgatgttcgcggctggttatggtgtcaactggcgtcttgctcagggtcttaatactgtaggtatcgaccttgcactggatagccagcgcctgaaactgaaaaaattcaacaaagcacgcgttaacttctatctgaacggtaacgaaaacatcaaggttgatggtcataaagcaatgggtattaaaaaccacaaaaacacccagcaactgaccctgacaactgacctgaccactgcgcaatttgacgcactgatcgacttcttcaccattggtgaattcggcgttctggcccgcaataacttcgttgcaaaatacgatattatgtgggtatcgcctgaaattatggctaacctggcacgtccgcacatcgttaacggtgctgttgttggtagcgtgcttcaaactgttatgccgttcgcccctgttggtgaaatccgccagacctttgcactgaaaggcaatgaaattatcgcttatcagcgccgccgtgacgtcattaccccgctggttggtatgactactggcgtagtgcctcttccgcgctttatgccaactgataactacaacttccgcatcatgtcagcagaaggtttacagatcacctgcgacatgttaggccgttccggtgtcgtttacggtcacgcataatctgacgttttcctgtaactccccggcgcgatgccggggatttttttttgtatgtggagcaaacaaaatggtcactacagaacaggcgcgggaatatcttgaaagccagggtattgacctgccagacattattttatctttgctggtggagcaggcaaatagcgttaatgaatgccttgatgctaactatccggcctccactgcaacattaattcagctttacctgatcgggctgttaggactcacacaggcgaataaatacgtttcctcacacacaggtccgaacggtgcaagccagtcttaccgctatgttgatttcaataaaaaatggagggcggcttgctcgttgctacgctcgattgacaagcataattgcacagcagaactgattccagcagatccagaagccaccgcacacgccggactatggattggtaagagtgggaggatgtaaccatgtggaatgatctaacgctaccaaaaccactaatgccgaagccgtttacccgcgtatgggtgaagactgacacagggcgacaggtcgccgcctatctcaatgatgctggtgaatgggtaattctttgcccgcgcgtggcgaaaacccatccgaaaattgttaaatggagctatggctatgagtaagatcgcgcgattcagctacaaggcattagccaccatttacccagtaacgcgtgacgactggacaaactccgatgtatacggtgcaccatacctgattgattgctcatgggagcgcacagacggcacggcaacagacacaaacggcaatgaggttagcaatacaataaccgtatttaccgaactgcttcacaatatgcagccagtacagcgcccggaaaaaggctggatgattgccactggtgacaccactgatatttccgacccgctggcggcaggggccaacgttataaccggaatcgttgaatgggacatgagcatgtttaacgacacgccggattataagatcgtgacagggggttaatcatgcctatcaagggtgttaaacgtgtcagagaacgattaaagcaggagctaaaggaaattacagataagaaaactcatgaagtgttatggcgtgtagggatgctggctggtggcttcgcggcgaacatgaccccagttgacacgggttttttaattaacagtcaatttcagtatataggaaacacggcggagggtatgcagttacggcttggatatactgcccggtatgctgaatgggtgcacaatatgccaggtaaattaaagggacagccgcgcgaacatttcggcaagactagcgaaggggttgaattcggcggcggtactggaaaaggtaaatattgggacccaaacgcggagccggaattcttgcgcacagcattcgaagatccaaacaacgccgacgatatttataaagagattgtagaaggttacaaaacatgaaacgcagcgaagtatacgacgaaataagggattggattaaatcccacgggtacgataaaggctatattttgcaagcccgtttctggaatgaaaaatccaattcgaataacgaccgatacattgtcattcagcaaaacggcggcgcggctggtgaggaagcaataacccgtgattatttccgcatcctggttatttcggcgcgtaatgacgcaaatatcagtgaagtggaagaccttgccgacgccatccgtcaaagtatgttaacagaatataaaactgataaaattacacacatgaagccagtaggcgctattcctgcaatgcagacaagagaagggcgctttatttttaccgtagcttttcaaaccatcatatctagataagaggtaacaaacatgtctcagacttgcgaaaagggatcgtttttgggccgcgacgtggctgtattctacgctatcgcttgtcctaacgctaagccgttagatgacgcttacaaagcgttaggaatgatgcgcggtaaaacgctttccgtcgaatgggaaaccgcagacgccaccgctgataaatcagcagactacacgaaagaatcaatggttacttacaaatccgtttctttctccggcgatggtgtatcccgtactgaagaaattcacaaccagaaggcattgaaacgtcacaccattaaccctggcgaaaccactggcaatcaaccatatgtatggctgaaaattgtttctccggttgacgtaactgaaggaccatttctttgcacatcctttaaagaagaagatccgcacgatgatgtctcaacctggtctattgagtgttcaagcgctggccaggtaacggtagatgacatcccggcagcataataatcaatattaataatcggggccgttggcccctttcttttagggtgaaagctatgattcatgttcgaactggacaatttgcggctgtagtcgatggcaggcggtatgtatttaatccctgtttcgccgcaatggctaagatcggcagtgacagagaactggtagaatacttcgcaaccatccacggtggcaaatatccatcacgattgccagcagatccagacctacgcaatcgcattctggcgcggtgttatggtgagatagtgcaaacgtctatgcgcatcctgaaatgttgctcagaagaggaaacagggccattgcttggcgaatgctggtttactccttctggcaagttacgactaaaacccggattgatgcctactgatgacgtcatcacgcttgcgcagcattgcatgtaccacggtttaatcggtgatggaccggaagaatacgctggagagatccgggaaggtgaatataagccgacatttgacgtccttgaattcgtttattctgccgtcgctcacctgggattatctgaatcagaagcatggaatatgacaatgaccggatatagggccgctgtgcgcgctaaaacgccgccagacgaaagaaacgagagaagcaagccaaatgttcacataaataaacgtgcttatgatgagcaaatggaggccgctaaaaaggcactggaaagaatgaaaaatcgcaagcaagaaaaagcccggaattaaccgggcctttatttttatttgtatgctgcaaagcgccatcttgcctcttctaaatcatggactgtgtacacgttatcgtaaagataagtcgcgatctgtgctttctgtacgtcagttgcgtcagaaaactccatgttgacgaaagttaaagcatctatgtagtgtttaaacatcttcttgttgacgcatagggcgtaaatcaatacagcaggccaacaaatcagagcgccaataaatgcaaggaacatattaagatgttttttctcggctacaaccatagttaccacaaatccaataaagagaattactagttccatgatgcaccgccttatttacattcgccttttattgttaatgccagcacgaatacagccattacattaaaagccacccatgctgatatatacacttctatgatgcttttgatggtatccatgtgcgcctcgcttaatttttgtttttaagtgcttttaacatttcttcgatgaagtccgcatagcgttcatgttcgttgggacggtagtttacgtttttcattttcttatcctcttttgcttcctccggttaatccggccttttaaatccctttgctgtttccttagttttaggggttttcgcctccctcgttccatcggttagctgtgcttcaagtcttaatcctttatatccttcgaccttcttttatctctctcatccttcaccttctttatacaaaatgtattcgttgaaatgaagccattttgtataaaatagagacatagatcacattttgtatgaggttaaatcatggctaccagtgtaggtacaatttattacgaggttgatgcaaaaactggtcaacttctcgttgcacaacgacaggcagaccaggcctttgaccgtatagagcgcggcgcaaaacaggctgaccgccaggtaaacaccctgaaaacatccatcaaagcactgaccagggtcatccatctgctacttgctgcggaagcagtgcgccaatttatggatatggcggaacaagcaaaaatgctacgcgtaaaaatcaaaatgcttactggcgatgcggagtccgccggacgggttttcgacggcctgaaagcaatatcgaaagaaacaggccagagcctgaaagatactggcgaattatggcaaggacttgccatctcattaaaaaacacatccgctactgaaggccagttacttaaccttgttggcactattcagaaaatgggggcgttaggtggtgcatcagcggaacagatgtctaactcaatgcgccagttccgccaggctatcgacggcggcgtactccgtgctgaagaattcaacagccttcttgagaacaccccgaccatcgtacagacaatggcccgccagatgggattatcaatgggccagttccgcgcagaaatgctggacggcaagatcacggctgaaaggatggtcaacgcgatccaggcggctacgcaggaaacaaacgataagtttgctcagttgccgcgcacatccggtacggctatcaatgagcttaaagtagagatcatgggccttgttgagcagttggacgatcttttcggcgtatcagacggcgtggtatcagctatcgacttaatcacgaagggcgttaaaggacttggcgagggcgctaaattcgctaaaacatgctttgacactctcaaaacggctgggagtgaattcatcgacatgtttgacgacgttgctgttaaagctggtgaggtggcggaagagatcattagaatggtaacgccaataaaagcgctaatggatggctacaaatggatgaaggaaattgtcgataaacgcaaggaagagctaaacagtaacaacgagaaaaaattcggccctaccgtcggcaaggtcatgacgtttgcaaacgatattaaaaacgcgactgccgcttatgatgagttcatgcagaaacagggtgaggctaacgacggcaagatcaccggattcgatcagccagttgataagccgaaaaaaccgaaaaaagagaagaaatcagaagctgatcggcttggtgacaaaggcataagcgtttctgaccagtacaacaaagacgccgccgccatgcgcaaagcattagagaacggcaaggccattgatgctgcattcgcccagggtaaaatcacactccttgaataccgcgccgcgcaaaaagggatcggcaaagaactgaaggaagaattagcgcaaatccctgtagatgaattgcgtgataaatggtcgcaaatagttagcccgatggaccagctaaaaggcgaggttgaccctattcagcaggtacagaatgaatgggccattcgtaagcaaatgcttatcgacctgggggctaccgaagcgcaacagaaacaggaattgttagcctatgagcaacagatccgcgatctgaagtgggagcagtggcaagcgcaaagcgacactaacggcctgatcggtgattgcgttaatggccttaaaggtggtatgagcaatgcacttgttggcctgttaaacggtactcaatcattgagcgatgtttttgctaacttaggtagcaatatcctcggcaatattggtagcagactttcagatatagccgctgactggatagcagatcaaatcatgatggagacacaaagcaaggccacgcaagcaagtacaacggcgggcgcggtagcggcgcaaggccagattgctgcggcggcggccccggcggcggcggcaacagcggcgtcaactggcggcgcatgggctgcggctggttctgcggcactaactgcgatcatgtcgctggctacgtcaattttcggcggtggtcgctttaatggtggtagcgttattggtggcaatatgtaccgcgtaggggaacataacaggccggagctattccagacatctaacggaaatcaatatatgatcccaggcgagaatggcagggttattcctgggcgtgatattggcggtggcgtcggcattagtatgcctgtcaatatcaacattcagaccacaaacggatttagcgacgaagacagtcgcagacttgaacaaacaatggaacgtgtagcaatgaaaatgataacaagggaatcacaaagaccaggcggaatattgcaaccgcgccgcaaataaacaaagccccggcattgtgccggggttatcttttattcaatttcatcatttttaaattcgccgtttacataaagctgtaatgcatttattagttctgcggcttgctttttatctattacgatcaattcgcagtcgcactcaagccataatctttcgtcatactcaatgctaagagtaatacgtctgcattcttccgtttcgttaataatcattatcaatctccactgtgctattaatcacataaataaatttactcaaaacttgtatatcctctttcaattttcccgcctcttacacttcttgcaaatactgcgtcagtatgcttgaaaaatggttcagtatatgtgtctcctttgctatccatccattttacgatccaggccatacgttttacattgcttttatttgccgggtttttcattttattttcctccgcaaattacaatcttccgtttcttgctatgtagctgcgagcaaacatcacttgccagatgttccagatctcacgccaggtgaatttatcgtcattcatacctacctcacttatgcgcacctttgacgccgcagtgcctgttatattcaagatgatcgatgattaaccataccttgaggtcttcactgaacagccgccaatcagggttgatgtcaaatttaaaaccgtatccgtcgcgtaactttttggggtgggcttctttcttcaaaaatgctttaagaagttccttgcctttcttgatgatccggtcatgtgcgtttttctgtgctttcaggtttttgtcaatcgctaccagtttcataacatccccctttgtgcaacgtctttcttatttgctttctgtatacaatatgtgattgccaaagtgaagccattttgaaaactggctataatcattgtgatgaggatctcatttttcgcgtagaatcgcgtaaaggtatatacaaaatgtaacttatagggggatttatgcctgaagtgttccgatggacaccacaaagaagctacagcgtaaacagtgagcctaacgtgtctgtcattaaactgggtgatgggtatgaacagcgccagacaaaagggattaaccctttacttgatagctatacgctggtctttaaaggtacgagcgcaggatgcggtgacgccggaaacgtagcgctacaggttgacgcatttttaagagcacgttgcgcggtcgaggcgttttactggaccccatccactgacggggtgcaaaggctttttgtatgcagaaagtggagcatgacgaaagacggcccggtatgcactcttaatgcaacgtttgaacaagtcgtcaattaatggaggtgtcaatatgtatgctatttgtgtagttgacctcgcgggcgcttttacattgtttgacgactacgagatcaacgaccttactgtaaaatctgataatggtgagacctggtatcttcatgacatgggcgacggttatgttggatgcagatcaagagaaggtaaggaggtcttattcttacttgacggcgtataaacacgaccccgcgcgaagcggggttttacattgttgatagcagaataaaaaataatcctattattataataatcacttctaatatgtagtgatcacacatatcataatgtttcccttaagtatgttaaccccttatcagtgacgaatgagtgattaacctggttttcatccgtcatgatgatgaataacttttcctgtaggtatttcgcttttgggtacagtgttaaacagacctggtacagtatcccgcgctcaatcagcaaatcaataaattcgtgctcatgataaccgatgaggcgggcggcctgtttcaacgtgtacacataatcaccgtgattgcgccgccccatgatttttattcccacgtttcaaaaaatagcatatcaggcacaaaatcatcaccgcaagcagttccgtaccctttcacccttgttccagaaatatcaagcactgtcagcggcacaaagtttaaacagttatcaacagtaaaataattgccagaagatgttttgaataatgggtatctatcttttatattaaaatccccccttttgttagatgtaacaacgagttttataataccaatcattttcatatattggcctactatttatttgccattaaaacagcccaggttatctatgcagaagtcttttgccgctttttcgtattcgcgttttgcttctggatcgtctgccgggaaaccttttgcgtgtatttcaccagggcaagactgatccatagaatcagcaaattcaacattgacgttaaagttaatatctttcgggttcatctcttccaccttgtccggtacttggaccggagtaatatcaaaatctcgagcgttagaccaacagcgaagtaattcgcgaccctcatcacgcgcagctgtatatgtgtcaaatagccccatgctttcccattcacatttatcagtccacacgtctaatctgtattttttcattttttgttataacctcccatttgacaggttcgatcctgtaccccaaaacgcgttcgtcttcagcgagtaagagcgcgtcggtaagtgcctcgccttcatctttatacagggccacagtcatttccctgccatccgcaaggaacaccgtcaacctccacaccttatcatccatatcacacctccgcgccattttgttaactgtgcttccgtttgagtaaaatatacatattgtaaaaagcgcgatcaaccatttcggtatgatttagcgtgacgcagatcacaaaaaagcgaaaggtgataaaatgcgcaatatacctacagagatgattattgattccgtggacgctggtgtgggcgcggtgattgacttgttcgaactggacttgtcgcccctgggtggcgaggttatccgcttccattccggcgcgaatggctattacggcccggttatctggaagggggtagcttacaacagctacccgatcgaggccactggcttcgaaatgaaaaacgaaggcgtttattctcggcctcaaatggttgtagccaatatcggcggactcattactgggatgaataacgatttcaacgacctaagaggcatgaaggttacacgccgccaggtggaagtaaaatacctggacgctgttaacttccctaacggcaatccagatgcagatccatctattgaggctgtatctttttacgtcgttgaagcaatgagcgaggaaacagcggatcaggtgcaatatgagctgtcaactccaattgatgctgacaaggccgttatccctgggcgcaccatccttgctgacgtttgccagtggcaatacagaggcgacggttgtatgtacgctggcggaccagtagcaaacgataaagacgagccgacaagcgatcctaaagccgacagatgcagccaccgcttgagcggttgtcgtttacgtttcccgcgtccaaatccgttaccaatttcctgtttccctggttccagcaaggtaggttaatcatggtaatggaagacaaaatgttgcgttatgccgccgcgcatccgtttgaagaagtttgcggactggtgatagataacgaatatttttacccttgcgctaacgtgtctgaaacgccatacaacagctttaaaatttcgcctgacgattacatcaaagctgacgaattgggcgttataaccgccgtttttcactctcacgttaatgatattcctgtattgtcggcacgggatcgacaacagcaagttatttcagggctaccctggattttgtattcaggcggcaagataaggaaattccgtccggtagcgcacctgttaggcagaaaatttgagcacggaaaaacagactgctacgcgcttttccgcgacgcctatcacctttgcggcgtggatctgcctgacttcgagcgccttgatgggtggtggttgcgtggtgaaaacctgtatttaaaaaacttgccgctaaacgggttttatcaggttgacgcgcgaagcatcaagccaggtgacgtaataatcaggcagccgttcaaaggtgctgacccatgccacgcgatgatttacctgggcgataacactgttttgcatcatgacaatgccggactgctaagccgccgcgagcaaatgcgccccgcttatgttcgacaaacgaattcaatatggagatctgataaatgctcaaatttagatttacgggcaatcttcgaagatattacagcaaagtgtgtttaaacgttgaaacgccagcgcaaggacttcgcttattgacctcacagaatcaggaattcaagaaggcgtttttaaataccccattgcgcttgcgaattgccggaaaagattatgacgaaaagaccgcgcccgcagcggttaacagtaaataccctgacgggactactgtcattgttgcgccagtggtggaaggcggtattgcaggaattggcgttgtaggctggattttgatcggtgtttcggttgttagcgttgcgttctcgatctttatgtctcgcaacatgaagataaaaacatcagcagaaagcgcacaagataacaccatatctaataacacctacaccagcgttgaaaacaaggtaggccagggtagaccagtgccgatcctattgggtgaaatgaaaataggttcaaacgtcggatcgttaggcatagacacaagtaataacaaagacgccttagacgttgtaagttaacaggagaaaaggccatgagtagcggcggcggcaaagccaaaacaccaacattattaaacgataacctgtatcataaacagttttatcgtgttttagacattctcagcgaggggccgatatacggcccggtaaaccagaaagcgccattaaacagcgtaatgcttaatgacacacctgtaactgacgcgaacggaaatacatcaatcccggggattagtatagcctggcgcaatggcacggctgaccaatcgccgattaatggttttaacgctatcgaatcaacagttattgtcaacgcaaaggtaactcacgatacgccaataatcaggactgtttcagatccaaacgttaaccgcgtaaggctgaatgttggcgttgatgctctcgttcagtcagatgataagggcaatcaatataacacgtcagtcatgttaatggttgatgttaagccatcatcatcatctacgtggtcgctggttaaaaacattacaatcgggcctggtaaacagagtggtgaataccttgaagctcacgttatcaacgcgccggatgaaaagccgtttgatattcgcgttcgtcgcgtaacgccagacagcaaaagcgatcttcttcgtaatgatacgcggtggagcagttacagcgagataatcgacgataacctgtcttaccctcataccgctgtagctggcgcggtaattgaccatgaccagtatactgatactcctacccgcacctatcacctgcgtgggctgattgttgatgtgccggacaactataaccctgaaacgcgcgcgtattccggtttatggcttggtggctttaaaaaagcgtataccaataaccctgcatggcttttccggtatctggttaaaaatgaacgtttcggacttgctcgccacgctggttacattgacgttgacgacggcgcattatatacgctttctcaatactgtgaccagttggttgatgatggctacggtggccttgagcctcgcatgacgcttaacgcttacatcacagagcaaatgagcgcacgcgacttactggacaatatcgccgggatgttcaggggtatcgcattatgggacgggcaacgccttaccgtgatgattgatgcaccacaagacccgatcgccaccattacaaatgcaaacgtcgttgatggcgagtttactcgttcaagtatcgcccgcgcagaatgctacaacgcagtgatcgtatcatggactgacccggaaaacggatgggagcaatcaaaagagtatgtggcagacgatgagctgatcgcccgtgatggttacaacgaaaccacgttagaggcgttcgggtgcacatcacgcgggcaagcataccgcgcgggcaagtggctgatagaaacagcaaaacgcgagccgtcaaaattcacgtttaaaatggcccgtgacgcgattcactttacgccaggggatattatcgagatactcgacaataaccgcgcaggcgctcgtttaggcggtcgcatcgtggcgaacaatggcaaggtgataacggtcgataaggttgattcggaatacatcaccgcaggcgataccattagtttgcttgatagtgatggcaaatttaagaaacaccagatcaccggggtgagcggaaacaaaatcacactggcggcggccccgtcatggattcgaaacggcactgtttttgctgtatcgactgaatctgcaaaacctgttctgtgtcgaattatcagcgtggcagaaacagaaaataatagcgtgtacaccatcgaggccgcacagcacgaccaaaacaagcaagctgtagtcgatgaaggcgcaatctttgaggtcaacaacgacacgcttaatcacttccgcgtgccgaacattgaaaacctgaaggtgttaaatgttggttctgaaactgttcaatgtcgcgctacatgggaaacacagacgacaacgcatcgcctgacctttgagatccgcgtatataacgacgaaggccgcgtggtggcagcttatgaaacaacgaattaccgctatgatttttatggcctcgacgctggcagctacacgcttggtattcgcgggcgtaatgacactggcatgaagggtgcggaaagtattgtggatctggttattggtgcgccagcggccccgattggagtcaattgggtttccggcgtcttccaggcaacggtatatccgatcagcaaaacaaccctgaccactgatacagcatacgagttttattactcaggtgaaaaccagatcacagacccatcaaaagtaaccacgctggcgcaattcaccgggcgcggataccaatggacttttggcggcatgaacacgggccataaatattacgtttatgtgcgcacgcgtaacgctttcggtgtgtcagacttcgttgaggcatcaggcaaacctacagaaaacttcgacgaaatcagcgactacgtgatgaaggatgtcatggagtcagaacagtttaaggacatgattggcgatattaaagatcttggcgaccgtgccgaccttatcgaaagcgctaccaatgaccttaagactgctactgacaacctcaaaactgcaactgataacctgacaaacatcactgacgaattgagggttgacacggacaacctgacaaacatcactgacgaattgaggactgatacggacggcctaatcacagaaactggggccataaaagctgacacggacacactgaaaaaagaaacggaagatctctataaaaaggttgaggaaaacgccgacgatattggacagcatgaggcaagaatagattctcttgaggtatctagcgaaaaagttggcagtgaactggcgcaagcaaaagcaagcctgcaaaacgcgtcattggcgcttatcaataactcacttgcacagaccaacacgcgggttactctcaccgctcagtacaagaaaggtaggacagaaacgaaggccgaaattgaccgcattgacaacgttattgctgaagagaaaaaggcaacggctgaatcactgaaaaccatcacggcagaaatgaacacgatggattctaacctcaaaggtcagatctcaaacgtggaacacgcagtggctgacgaggccagcgcccgcgctgaagccattaacggtgtgaatgcttcaataggcaatctcgacaagaaaaccgacgccagcatcaatagacttgatcaagctattgcagacgaaacgaacgcccgcacacaggcagtcagtgacgttaacgcgagtatctcatcgctcgacaagaaaacagacgccagcgttaaacgcttggatcaagcaatagcagacgaaaccagtgcaagaactgaagctatcagcagtgttaacgcctcaataaacagcattgacactaaggttacaagcaacgtaacacgtattgataaagccatcgcagacgaaacgaaggcacgcacagacgcgatcagcggcgtcaaagcaagtattgacacacttgaaggtaacaccaattcagaagttaaacgcctggaccaggcaatttctgacgaggccagcgcacgcagccaggcggtgagcgatgttaaagcgtcaataagcaatcttgaaagcaaaactgacgcaagtgtttcccgtctcgacaaggctatcgctgacgaaacacaggcaagaagcgctgcaataacagatgttaaggctgatttgacaacgctcgaaaacagcacaaacgccagcgtcaaacgacttgatcaggcgattgccgacgaatcaagcgcacgcgctgaagcaatctcaggcattaacgcagagatcggcagcattgaaaacaacgttgacaaaaacagcgatgatataaatcagaccaaagcaagcctgcaaaacgcttcgattgcgcttattaataactcaatcgctcaaaccaacactcgcgttacccttacggcccagtacaagaaaggtcgcaaggaaacaaacgcgcagattgatcgtattgacagcgttatcgctgaagagaaaaaggctacagccgaagcaattggcgtggtaaaagcatcgatcacggatctcgacaagaaaaccaacgccagcgtttcacgtctcgataaggccattgcagacgaaaccaacgcacgcagcgagtcaatcagcggtgttaacgcaagcattaacacgcttgaaagcaacacagaatcagaggttagcagactggaccaggcaattgctgacgaggcaagcgccagagcacaagccatcagtggcgtgaatgcgtcaatttcaacccttgatggcaaagttacaagcaacgtgacccgtatcgacaaggccatcgctgacgaaacgaaggcccgcactgacgcgataagtagtcttaactcatcgcttaccagtacgattaattcgaaagtatctgaagtatccacagcactttctacgcatgaagcatcaagcgcggaaaaattcaaccagatctcagcgtctttcgaagcggtaaactcaagcatcacagaatggtcgcagaccatgacaacggcggacgaggcattatcaaccaaaattgatcagctgacagtgaccgttaacgggaacaccacggcgatcgagacaacatctaaagcgttaaccgacttcaaaggtaacgttgatgcgtcattgtcaatcaagattgccaccgacaacaacggcatgaaatacgcaacaggtatgtcacttggcctgactggtagcggtactaacgttcaatcgcagtgtattttccttgttgaccgcttcgtgttaatgactgcggcaaacggcacatatacaacgcctttctatgtgtctaatggtgcaatgtatgtgaaagaagcgtttattaaagacgcctcgatcactaacgcgaaaataggttcatacatccagtcaaataactatgtttccggcagcactggctggaaactggataaatcagggacgtttgaaaactatggcgcggtaagtggcgaaggtgcaatgaaattaactaataccactatctcggtaaaagacggcaacgggcgtttacgcgtacaaattggtaggattacaggatcatggtagaattaaggggccgacttgttcggcctcggtttttattaatgaggtgtaattatggctactttcggcattgcaacatgggacgccaacggaaacgctaataactatgggatcaaaccttccgtcgtggttggttatatttccctatcttccgggcaagtgtccggcacgtataattttacagttcctacaggatgtaaattatcttatgccatgacgcttgatcatggcacaacatcaacgacgcgcagaaagatcagcatttcaggtggcaccgtttccatttcctcagcagggaatacagtaggcgctaatatatggcccgcgtcacagtgtgaaattgttatatttgcggaggtggcttaatggcaacttttggcgcttatctgcttttaagtaacggcaatgtatttgtcacgcccgacgctacgcctatgtgcctttacacaagacagcaaatatcttgtccatcaacgcaaaacacatcaaaatacattacagtcccaacaaataagcctgtaatggtatttgtaaagacaagtataggcggtgttacagcaagcgttagcagggctaactctggacaaatactttgcgcttttggtagagatgtcaacaatacctatactgcaactgtatatgtattttctattttttctccccccctccccaaatggggtatggctatatggaattcatcgggtgagcttgttttgacaaatgaatcaagaatattaactgacatcatcacggtgggttctccgggtaatggaggcgggataaatatagatcagacactttcaggatcatacgcaatttgcccgcaattgttgggcgcggttgttgggcaaggttcagcatcgatttatgctgccgcatactataacggcagcaaaacaaggatctatggtgttacggctggtggcgtatataatcctactggctacataaaccacggtaacgccataaccgccattaaaaccgatgcctatgattaattcagttccgggcaatccgttttattgaagtggtcaacgcttacccattggaagttaaacggatacccggccttaaccattttatgaccgccaacatccgcgacaccgaagactgcaaccgcatactcattaccgccagtttgataagttgccatgcattcacgtttcggcatatcagcgcaaccaaccagaccagcgaccattgcagcgatagcgatatttttaaagcctttcattgtcttaccctccattgttaagttggttgtagtatccataaacagctttttaacaacattgacataaatcaataaatacattttgtgcgcgtcaaaaatgtaacatagatcacaaaatggtagaattattccgttaattaacataatggagtcattgcgatgatttacacaactggaacaattgccatcaacggtaatactgttacaggcacggggacaaacttttccgagcctctttctctcattcgtgtagggtgcacgctcattgctgttggcaaccctgtacagatctttaccatcacagaaattaagagcggcactgaactatcagtaacgccagcggctaaccctgcaattgctgccgggacaaaatttagcattctgctatctgactcgatctcagttgatgggcttgctcaggacgtagccgaaactctgcgttactaccagggcaaggaatcagagatcgcaacagctgtagaatggtggaatgagttcggcggtgatggtcagatggaacaacttcttgccgacattcgcacagaaacggcgcaatcaaccgccaacgctcaaaaaacagaatcagacaaaaacgcagcggcatcatcaaaaacagcagcagcaaactcagcaaccgcagcaaaagcgtcacaggatgcagcaaaagcaagcgaaacagcagccagcaacagcaaaacggcggcggccaccagtgaaaccaatgcggcaaaatcagcagccgatgcgctaaactatcgcaaccaggcgcagggcattgttggagacagtatcggacttggagcaaacaggagggattggcctgactgtaacgaccctacaggctatataggtttttgccgtgctgaagcgtcaacagcaaaaaactttccgtcgattgcatctggcgaactttaccttgtaggctggctggcgcgtggtgacggttctgttattaacggctgtttcgttggtactgtcacccgttcactgtatacctacgcctataacaactcagacaaatcagttgcgtggacacgccacgcaagaaaagatgagattgatcgcttagtgcaaattacaggtgatcagactcgcctttacgctggcaacggtaaaacatatttggaagttggcaacgatcgggcatggggtgtttataatggcgagactggtcaatggaaaccgttagatcttgcgcaaggtggcacagcaggacgtaatgcagaacaagcgcgcacaaaccttgaagttatgcatgagcgaaaatcaagtcttggttccaccaacattaatacgctaaccggcgagtattctggtttttattaccagggaataaactcaaatgccactaatgagcgcggttatcctgtatcaagtgctggagcattgcttgttatcagaaataatgcgaacggtaacgcaggatgcacgcagctttatttcccttacaatgctgtaaatggcgttttttatatgcgccaatacgtcctacagttttctgaaactggctgggaatggaccacatggaagaaatttcagtcactagattatgctgatagcccgcaatttacaaaccttaaccttgtaaattctacagatgcggcaactattggtggcggtatcttgcaaagtatccttagcgatacatcaggagcgcaaagaaccagatcgcgcacttactcagagatcaggggcgacggtaaggcgtgggcgacaactcacctacagcgtaatgatataaacgtatatgcaggattgagcgaagacggcgactttgctttaagtaaaggatcttttataggcaaaactgcaacattattgtccaacgcaagcaatccattaactttgacgagcgcacacccaacaattaaatttaatgagactgacagacctgaaggtgcgccggactacgcttttatctgtgatggtgggaactggcgtattgaaagagatcattgggatacgtcaaaagctaaagattgcatctcatatagttacagtaaacaagaagtcacagtccaaaatcttttggcccaaaatgttgccattcatggcgccagcagcagcggggctggttcactccggattgaaagtcaacgaagttcagacgaagggatgtatattcaggcatggggtaacggcacggatcgcttgtctgttatggaggtaaaactagactcaggattcctattctatgtccaaaaggtcgctgacggaagcagggtactaagggttaacggttcagtaacatgcacaacagttaaccagctttcagatcgcgacctaaaagacaacattcaggttataggtgacgctactgaagcaatccgtaaaatgaacgggtacacctacacgcttaaggaaaatggcctgccttacgctggcgttatcgctcaggaggtcatggaggcgctaccggaagcagtaggatcgtttactcattacggtgaggcattacaaggcccgaccattgacggcaacgagctacgcgaagaaacgcgttacctaaacgttgattatgcggcagtgactggtttacttgtccaggtggcacgcgaaacagataaccgcgtcaccgaactggaggaagaaaacgccagcttacgagctaacattgccgtcatggatgagcggatcactaaacttgaagcgcttgtccggcagttgaccggaagcgaaaaataagaggtgatgtgcgaagaacatcgccgcgcgaaacgaggctaacgcctcgtttctttttgtgtaccaaatagtgaccaaaatgataaatcaaaaacaaaaacaaagcataacgcattgaatacaaatgaatttttcattaagttatccattcaaaagataagtggatagggcaagactaacgaatagtaagtacccagtttcgcgtctggtttgtagcgttgcaggaatccaagaaacagtggaacaaaaggagatactggcgctaaaggcaatacggatgagtcggcaatacgaaagaggatttgcgcaaatgccgggtgaaagccaagtagcataaacattggtacgaaaatgggggccagaatcgaccagattgcggaaccgctggcgataaacatgcataagaaagaggaaagcaacgccagaccgacaaacgccgggatgccgctaagccctgaactttccagtatatcggtcagccccacggcgatgaatttccccatgttgctccagttaaacatggcgacaaactgggcgaggggaaaaaccatcacgataaatcccgccatctctttcatcggttcaatcattaaatgcggtaaatccgcctgacgtcgaattgtgcgagtagcgatgccataagccagcgagaccacaaagaaaaaaagaatgatcagtggcacgatacctttaataaagggtgatggcatcacggtgtgattaatcggatcgcgcaatatcccgttttccgggatcaccatcagcgcaatcgcagcaataaaaagtagcgatacgacacctgctatgcgtaaaccaaaacgctgactttcggtcaatgtctgcagtttctcatcgctgtttccctgccattgacctaaccgtggttcgatgattttgtcggttatcaggccgccaacaatcgtcagtacgactacggagctggccataaaataccagttatcaattacactgacgtgcatttgcggattgaacgcagccgccgcttccgtgctgatccccgacagcaacacgtcggttgtgacaatcagtaaattagccgtaaagccgcaacctacgcctgcaatggcggccagtaaacctgcaactggatgtctgcccaccgccagaaaaatcagcgcacccatcggtggcatgatcactaacgccgcatcggaagaaatgtggctgaaaaaagcaataaacagcaccatataactggcgtagcgggcattaacatgcgatgccattttaaccattagcgctggcagtaagccgacgcgctccgccagaccggcacctaaaaccagcgccaggatcgcgccaagtggggcaaaaccgctaaagtttttaataacattgggtaaaaaccagtgtaatccttccacactgagcaggtttttcaccatgaccggcgtaccatcggtcgggtttttcgcactgacgccaaaggccgacaaaattgccgtcgtcaccatgagtacgataatcaaatagataaagagcaaaaaaggatggggaaccttgttaccaattctttcgacccagccatagagcttcccggattgggaggatgacggtatggatgacatactcatggacattcctcggttgttgtgtttgcgttgttgttattttaaaggtgacggtgtcacgtttttcgggatagggcagtgatacggttgcgtgtccgtaacttgctgatgctcttgttggcattcttgcaatagccctgaatcaatgaagagattgactgtggttgcagccatagttttcgccgcgagtagcattcctttatgagcaatagatgttcgcccctggctaaccagttgccacgtatgtagcggtgtaccgacggcaaaacaggggctgaaacactgggcaacaggcagtttccaactgacgtcgccgacatctgtcgatgctgcaagcacgttatcggtggcggcatatggagcgacttcattcgccagtaccgtttcacgatgacgtagtgcaaaaaccttgccgttttcgccaccggttgcggcgatattattcagactgttttgccgatcgttggaggtgagcgtagcctgaatttgtttcgcaaaagccagttcttcggagttccattccggggtaccaaaatgggatagggctcggtacatggcattttctaaggtgcgattcgggagataactggaacaggctttgtcgaagcggcattcaaccgtggtttcggtcatcaatgccgcaccttcggcgattttggcgacccgatcataaatatgctgcacgtcggtcatttcgggggcgcggataagataaagcacttctgcctgcgcctggaccacgttgggtgagatcccgccgctatttgtgatggcatagtgtacgcgcgctttttcaataatatgttcgttgaggaagttggtgccagtggtcatcaacgttacggcatcaagggcgctgcgtcccaaatgaggggaattcgcggcatgtgctgcgatccctttaaagcgccatgatgcctgaatgtttgccagcgtgcgggtattgaacatgccggcaaaggcttccgggtgccaggtgagtgccgcatccacatcatcaaataccccctcgcggaccatgaacgttttacccgagccgccttcttcgccaggacaaccataaaagcgcactgtgccgccttgcccatattgttccagccatttcttgacggctattgcagcggcaaaggcggcggttcccagcaaattgtgtccgcaaccgtgaccattttcaccgggcgtcgcggaaataggttgcgcgcaaccagcttgctgacttaaacctgccagggcgtcatattctcccagcagggcgataaccggtttgccttgaccaaacgaagcaataaaggcatttgggatattgcctacgttgcgggtaacggtgaagcctgcagattccagcgtcgaagccagatgctccgctgaccagaactcttcaaaacgtgtttctggatgatcccagatttgatcggcaatatcggtataacgttggcgatcggcttcaatcgcatcgtcgataaaacgatagatttcctgcatcagatacctcgcgtccagggaaaattgagcgcggtgcgcgccagcgtttcgacggcaatagcgagaacctgctcgtcaaaatcgaatttttcgttgtgatgacctgccgccagctgtgtgccaaacaccacgtaggaggcttgcccttgatgttgctgcacgcgggccatcattaatgtggcatcttcggaacccgcaggcgcttcaacacgttcaatggcctgattgacccccgcgacctgagccgcctgactttgcaaccatgcgacccattgcggcgaaggagaactggcggtagctgcacccatcagacgagtttcaacgccgacaccatacatggttgctgcgccctgaatcgcttgttgtgcacggtcaaaaacatattgattaatgacgtcgctggccccgcgtgtttccactttcagcaacgccgaggcaggaacaacgttacgaccgcttcctgcctgcataacgcccacgtttactctggaagctccttcgctgtgcggggcgattgcatgcagtgcaagagtggcttgtgctgccgccaacaaggcattgtgaccgtcttctggttttgcgcctgcgtgagcggcggtaccggtgaagtgcgcgtcaaatttggtggttgccataaaattatcactgccgcacaccacggtgcccgcaggtacgccagtgccaatgtgcacggcagtaaaataatcaacatcatctacgacacctgcatcgaccatcgcccgcgcgccacgcgtaccttcctctgcaggctgaaaaatcagtttgatgacgccatgtagtccggactcgaactgtttaagggtatgcgccagcccaagcccaatggcggtatgtccatcatgaccacaggcatgcatcattccggcgttacatgacgcaaaaccgtcgcggtaggggcgatggctgacatcctgctcttcactgagatccagcgcgtccatatcgacacggaaagccatcaccggaccggggcgaccggtatccagggtggcgacgataccagtgaaaccaccttcaaaagccgcaatccattgtgctagcgcaccctgttgacgagcgcgctcgaattcgcgttgtagagtgaattcatcaggtaatcccatccggctactttcattaactacttcgcgacccagcgccagtgaatagccgagctggtgcaattcttccgcaacaagggtggcagtgcggaattccacccagccagactctgcatagtgatgaaaatcacgtcgccagtgcgataattttggggcaagcgaattaacaaattgattcaaagactccataacctttcccgtcatcagtaaaaagtgtgacccggttcacgtagcgatagtttttacttatcactaactgatttttcacagttttaaccgttcataaattaccctgacacaatcatctgcattaaagtagatgccagtttctttggtctgataaataacggttatcggtggcgtcatggcttttcaggtaaaaattcatcaaattcgggcttttgttgaagtggctcgtcagggcagcattcgcggagcgagccgaatgttgaatatgtcgcaaccggcactgagtaaatctattcaggagctggaagaagggttagcggcgcaactcttttttcgccgtagtaaaggcgtgacgttaactgatgccggtgaaagtttttatcagcacgccagtctaattcttgaagagctgcgcgcagcccaagaggatattcgccaacgacaagggcaactggcagggcagattaatatcggcatgggggccagtatttcccgcagtctgatgccagctgtcatatctcgttttcatcagcagcatccgcaggtaaaagtacgcattatggaagggcaactggtgtcgatgattaatgaattgcgtcagggagaattggatttcaccatcaatacctattatcagggaccgtacgaccacgaatttacttttgagaaattactggaaaagcaattcgcgatcttttgccgcccgggacaccccgccattggtgcccgttcgatcaaacagttactggattacagctggacaatgccgacgccacacggcagctactacaaacagttgagtgaattgcttgacgatcaggcgcaaacgccacaggtcggtgtagtctgcgagacgttctcagcctgtatcagtctggtggcaaaaagcgattttctcagcatactgcctgaagaaatgggctgcgatcccttgcacggacaggggctggtgatgttgccggttagcgaaattttaccgaaagcggcctattatttgattcagcggcgtgatagtcgccagacaccactgaccgcgtcattaatcacgcaattccggcgagaatgcggctatctgcaaagttaaaactgcataaaaaaatagagtctgtcgacatccgccagactctacagtacacacagcagtgcatccgcgtcttaaatccggcattgtctcctctgcgccggtgactgtgttataacggttttaacctttagttgccaattttcttcagtgacagatttcacgaaaatataagttacattattaatatcgtgaatgaataatcatgcataagtattttgcttaaaatatcggcaatatttggaacttattactggaaatttgggtaatacgttgttggaccgacccggtctggttatcatatcgcgctcttaattgcgggaggatgtaacatgaaccttgacgacaaatcgctgtttcttgacgccatggaagatgtccagccgctgaaacgtgctaccgatgtccactggcatccaacgcgtaaccaacgtgcgccgcagcgtatcgacacgctgcagcttgataatttcctcaccaccggatttctcgacatcatcccactaagtcagccgctggagtttcggcgggaagggttgcaacatggggtgctggataagctgcgcagtggtaaatatccgcaacaggcgagcctgaatcttttgcgccagccggtggaagagtgccgcaaaatggtgttcagttttattcaacaagccctggcggatggtttgcgtaacgtgctgattattcatggtaaagggcgggatgataaatcgcatgccaatattgtccgcagctatgtggcgcgctggctgaccgaatttgatgatgttcaggcatattgcaccgcgctaccgcatcatggcggcagcggggcgtgttacgtcgcactacgtaaaacggcgcaggcgaagcaagaaaactgggagcgccacgctaagcgcagtcgttgatctcgagacgcatccgcggcttatgccgccagcacgcggttgcgtccatcatttttcgcccgatacaaagcatcatcaacgcgtttaaacagttcatcgatgctttcatttccttcgtgatgcgccacaccaatgctgacggtaaagcgtggtaagcccgaaatactcacttttgccacgcttacgcggatagtttcagccagcgaaagcgcggtatccagtggggttcttggtagcaataagacaaactcttcgcctccccaacgaaacaccaaatcgcctttgcgagcgcaactttcgagggtgcgggcgagggcgcataacacctcatcacctttagaatgcccatagagatcgttaatgtgtttaaaacgatcggtgtcgatgagcaacaagctgtaatcctgagcgatggcgagatgctgcatttggcctggttccgtaatgtgataaaactgtcgccgattcagtaatccggtcatcgcgtcatggtgagcagcatgttccagctgctcctccagccgtttttgctcagtaatatcatgcacaatacataacatgagcttgtcgccataaatttcaatcggtccggcataggtctgcacatgacgagtcgaaccatccgccagtttatgaacaaaattcaaaggtttatgaccaccgggtaaatgcgagatttcatgcatgataggcatgacgcgacgcccgagcatatttatttcccaggtatgtttctggcacatcgtttcatggttataaccatagaaattgagcgcggcgaggttagcatcgacgatttgtccatctcgtgacgggtcaatcaacaacattggtgcagagttagtcagaaaaaagcgcgcataaaaaccttgttttttgcgctgataatttgccgagcgactggcttttaaacccagcgttgccggcgcttcgataccttcgaaaataatcaccggttctgtttctgtcagctttcgcaaaacaagccgacagctcaatgctgtttcctcttctttacgctgaacagtgaggatttcgataatatcgtgttggttttgcagatcggagaggtatttcggcagttctttttgtgaggagacggaatagggtccggttcgtagctgactaaacgtgaggtcttgcatcaacagtttcgccgcgctattggcataaattaactgttcctcaaagggcgaaacgatccagacaggactggtgagtaagtccagggtattgaagttgtgcgtaatcattgagatcccgttatttttatcaatttttgttgctatccgatcgcaaaaaagccacgtcatatgatcagataattctgataatgatagacgctatttaacacttcacacggtttgtatacggaaaagcattttgctttttgtattcaatttagacagaattttattaatcatttcagggtaatggggtgatgagatgttgcgtaacagggccagaaggctagactacaaaataatgcgttgatgatggaggcactgtggaagcgattaagggatcggacgttaatgtcccggatgcagtatttgcctggatgctggatggtagaggcggcgttaaaccgctggaaaatacagatgtgattgatgaagcgcatccctgttggctccaccttaattatgtacaccatgatagcgcccaatggctggcgacaacaccgctgcttcccaataacgtacgtgatgcgctggcgggcgagagcacgcgtccccgagtcagccgtctcggtgaaggcacgctgattacattgcgctgtataaacggcagcaccgatgaacgccccgatcaactggtcgccatgcgtgtatatatggacgggcggttaattgtttcgacccgacaacgcaaagtgctggcgctggacgatgtggtgagcgatctggaagagggcacgggtccgaccgattgcgggggatggctggtggatgtgtgcgatgcgttgaccgatcattccagtgaatttatcgagcagctgcacgataaaattatcgaccttgaagataatctccttgatcagcaaattccaccgcgtggattcctggctctgctgcgcaaacaattaattgtgatgcgtcgctatatggcaccgcaacgtgatgtttatgctcgtcttgccagtgaacgtttgccgtggatgagcgatgaccaacgccgtcggatgcaggatattgccgatcgccttgggcgcggccttgacgaaatcgacgcctgtatagcacggactggcgtgatggcggatgaaatcgctcaggtgatgcaggaaaatttagctcgtcgtacctatacaatgtcgttgatggcaatggtctttttacccagtacctttctgaccgggttatttggcgtcaaccttggtgggatccctggcggcgggtggcaattcggattttcaattttttgtattctgttagttgttcttattggtggtgttgctttatggttgcatcgtagtaaatggttgtaacaaaagcaatttttccggctgtctgtatacaaaaacgccgcaaagtttgagcgaagtcaataaactctctacccattcagggcaatatctctcttgcaggtgaatgcaacgtcaagcgatgggcgttgcgctccatattgtcttacttccttttttgaattactgcatagcacaattgattcgtacgacgccgactttgatgagtcggcttttttttgcctgttatttatcagcgtctaccctttaagagtccacccaatgaccagagggaaatatgacgacacttatttatttgcaaattcctgtccctgaaccgattcctggcgatcctgttccagtgcccgatccgatccctcgcccgcaacccatgcctgacccaccacccgatgaagaaccgattaaattgtcgcatcgtgagcgtagatctgcgaggatacgcgcctgctaactttgcgtcgatgaccacgagaatagattgtgaccgctttttctaccctgaatgttttgcctcccgcccaactcacgaaccttaatgagttgggttatttaaccatgacgccggtgcaggccgccgcgcttccggcgatccttgccggaaaagatgttcgcgtgcaggcgaaaaccggcagcggcaaaacggcggcttttggcctcggcttgttacagcaaattgatgcgtcgctatttcaaacccaggctttagtgctgtgtcctacgcgtgaactggcggatcaggtggcaggtgaattgcgtcggctggcgcgttttctgccaaataccaaaattttgacgttgtgcggtggtcaaccgttcggtatgcagcgtgattcgttgcaacatgcgccgcatattatcgtggcaacgccggggcgtttgctggatcacctgcaaaaaggcacggtatcactggatgcgttgaatacgctggtgatggatgaggccgaccgcatgctggatatgggatttagcgatgccattgatgatgtcatccgttttgcgcctgcatctcgacagacgcttctgttttcggcaacctggccggaagccatcgctgcaatcagcggacgagtgcaacgcgatcctttggcgattgaaattgactcaacagatgctttgccacccattgaacaacaattttatgagacatccagcaaaggcaaaattcctctgttgcaacggttattaagcttgcatcagccatcctcttgcgtggtgttttgcaataccaaaaaagattgccaggctgtctgcgacgcgctgaatgaagtagggcaaagtgcattgtcattacacggcgatttggagcaacgcgatcgcgatcagaccctggtacgttttgctaacggtagcgcccgtgtactggtcgcgactgatgttgctgcgcgtggtctggatattaaatcgcttgagctggtggtgaactttgagctggcgtgggaccctgaagttcatgtacatcgcatcggtcgtacagctcgtgcaggaaatagcggtctggcgatcagtttctgtgctccggaagaagcacagcgggccaatatcatttctgacatgttgcagataaaacttaactggcaaacgccgccagctaatagttccattgcgacgctggaagcagaaatggcaacgttgtgtatcgatggcgggaaaaaagccaaaatgcgcccgggtgatgtattaggtgcactgacaggagatatcgggcttgatggcgcagatattggcaaaatcgccgtgcatccggcgcatgtctatgtcgcggtccgtcaggctgttgctcataaagcatggaaacagttacagggcgggaagattaaaggaaaaacgtgccgggtgcggttattaaaataatgaaatgttgaattgccgggtgcaagagtaaacatcttattcgggattgccggatgcgacgctggccgcgtcttatccggcctccataagagtagcccgatacgcttgcgcatcgggcgctatcctggttatttcacttcaaccacattcagccgtaactcatccaactgattttcatcttcttctggctgccagcacgccggttgtagtgggatctcttcgcgatcaaacgccagatcacccccgttaaccacttcagaaccgtgggtgatgcctttgaaatcgaacaggttggtatcgcacagatgcgacggcaccacattctgcatcgcgctgaacatcgtctcgatacgccctggataacgtttatcccagtcacgcaacatgtcagcaatcacctgacgttgcaggttaggctgtgaaccgcacaggttgcacggaataatcgggaacgcttttgcatcggcaaatcgctgaatatctttctcgcggcagtaggccagcggacgaataacgatatgtttgccatcatcgctcatcagtttcggaggcatacctttcatcttaccgccgtagaacatatttaagaacaacgtttgcaggatatcgtcacgatggtgacccaacgcgatcttcgtcgcccccagttccgttgcggtacgataaaggataccgcgacgaaggcgagaacacagtgagcaagtggttttgccctctggaatcttctctttcacgataccgtaagtattctcttcaacaatcttgtactcaacgcccagcttttcaagatactcgggcagaacgtgttccgggaagcccggttgcttttgatcgaggttaacagccaccagcgaaaaattgattggcgcgctttgctgcaaattgcgcagaatctccagcatggtatagctgtctttacccccggagaggcaaaccatgatgcgatcgccttcttcaatcatattgaagtcagcaatggcttcgcccacgttacgacgcagacgtttttgtaatttgttcaggttgtattgttctttcttactaatttcttgattttgcgacatttaaaagtgactcaattcgttatatggcatcagaagagtatgcgtcatgccggaacgcccagcataagaaatctgatataaaaaactgtggcgtgtatggtacggattagaggggaaaatgtcagcacatttgcgaaatgaatcaaaaagcccgcagcaatgtgcgggcgttagtgtcagcgcacaaccagcacggagcactctgcgtgacgcactacagctgcggcgttggaaccgagcagataagtggtgatatccggtcgatgggaagcaatgatgatcatatgagcggggatcttcttcgccaattccagaatgcggtctttgggcgagccttcctcaacatggacatgcactctgtcggttggcagtttaaattttttaatgatctcttccagttgcgatttggcttccgctttcaggtcatccattgccggtaattctgcggaatacgctaaacccagagaggcatagtagggcagtgaaggtattaccgtcaggaaatgaacctctgcatcatcaatctttgcctcttcctcaacgtggctaatcacgcgttgagttaattctgaatcggaaatatcgatagggacaagaatcgttctgttcataaaacctcctgttttagtatccgcataaagtgtaacgccagatgacactttttgtgtaatgacggagttcacatttttaatttagatcaaaggaggaagaataagcagaaaaagcccgccataacagcgggcaggaggatttagaactgataaaccagacctaaagcgacaatatcatcggtagagatgccattggcagcgtagaagctgtcatcttcatccaacaggttgattttatagtcaacgtaggtggacatgtttttattgaaatagtaagtcgcgccaacatcggcgtatttaaccagatctttatcatcaacacctgccgggttgtctgcaccacccgcagcgtgcaggtcacggcctttagacatcaggaaagagactgccggacgcagaccaaaatcaaactggtactgtgcagtgacttcaaaattctgggttttgtttgccacagcataatcgctgtcgccaaacggggtcatattacgcgtttctgaatacatggttgccaggtaaatattgttagcatcgtattttagcccagcagtccacgcgtctgctttatcaccacccgccgcagtatggttaacctggtcattggtgcggtcagaagaggtgtatgccgcaccagcgctaaagcccatgcctaaatcatatgttgtggaaagaccccagccgtcaccgttttcatggcgaacatcacgtccgttgttggtgccttcctgaccattactggctccttcgttgttaccttgatactgcaccgcgaagttcagaccatttaccagaccgaagaaatcagtattacgataagtcgcgacgccattggctcgaccagtcataaagttgtctgcattggtataagagtcaccgccaaattcaggcagcatatcggtccagccttcgatgtcgtacattacgccataattacgtccgtaatcgaaagaaccgtaatctgcaaatttcagcccggcaaatgccagacgggtccatgactggttttttgaagattcagtgttgtttgcctgaatattgtattcccattgaccgtagccagtgagttgatcgttaatttgggtttcgcctttaaaacccagacgcgcatagctctggtcgccatctttcgctgaattatcagaaaaataatgcaggccatcaactttgccatacagatctaatttgttgccgtctttattataaacttcggctgcatgtgcagcacctgcggcgagcagggcaggaattaaaagtgccagtactttgcttttcattgaataaatcctttagttattttatttgccttttatccccatttcggggagtgaaaacatcctaaaggagaagttcagttagccgataaatatcatttgttacgccttaagtaaaaccttaatcaaataattcctctgaaatgataataagtctggtgaatgtatcgaagataatacatacaaaataaaaattatacttttaatttgctatacgttattctgcgcgggttatatgcctttattgtcacagattttattttctgttgggccattgcattgccactgattttccaacatataaaaagacaagcccgaacagtcgtccgggctttttttttagaattggataatccttatccagagcatttaatcggtgttgcttttttccgcttttccggccatttgtgccaggaagtcatagcgtttttgcaaatcagctgcagcatctttccataactgttctgccacttctggctgctgcgaattcagccgacggaaacgttgctcgtgaagtaacgtttcttccagtgcttctgacggcgggcgtgaatccaaggccagcggcagtttgccttcatcggcacgacgcggatcaaagcgatatagcggccagaagccggtagctgtgagttggcgcatctggtcgtggctgagtgccagatcgtaaccatgctcttcacacgggctataagcaatgatcagcgatggccccggatacgcttccgcttcctgaatcgctttcaccgtctggttcagctgcgcgccgagagaaatctgcgccacataaacatgaccgtacatcatcatactgacgccaagatctttacgcgctttacgtttgccgtgctcgccaaatttagttactgcacccagcggtgtcgctttcgacgcctgaccaccggtgttggaatagcattgcgtatccagcaccagaatgttgacgttttccgtcaaactcaatacatgatccagaccgccaaagccgatatcgtaagcccagccatcaccaccaatcagccagattgatttttccaccagtgcatctgcatcacgtagcagttcatgtgcttcggcaacatcgttgagttgctggcgtaaagctgcaacctgttcacgacgaacctctggcgtggcgtctgatttcaacgccgtcagtaattccgccgggattttatcggcaaattgatccagcagacgcagcacgcggacacggtgttgatcgaccgtcaggcggaaaccaaggccaaattcggcattatcttcaaatagagagttcgcccatgccggcccacgaccgttggcatcggtggtatacggtgtagagggcaggttaccgccataaattgaagaacagccagtggcgttagcgatcaacatccggtcgccatagagctgagtcagtaatttaatatacggcgtctcgccacaaccggagcaagcacctgaatattcaaacagcggtgtaatcagctgcgatgtacgaatatcaatacgttccagtttgctacggtcgatttctggcaggttgaggaagaaatcgtaattgattttctcttcttcgacatgttccaggcgagacatcatattgatggctttaatctctggattctgacggtctttcgccgggcaaacttcgacgcacaggttacaaccggtgcaatcttccggtgccacctgcaagacatatttctgcccgcgcatatcacgcgatttcacatccagcgaatgcaggctggcaggggcgttttccatcgcttcaggcggcaccacttttgcgcgaatagctgagtgtgggcaagcggcaacgcagtggttacattgggtacagagttcctctttccagatggggatctcttcggcgatattgcgtttttcccagcgcgtagtgcccatcggccaggtgccgtctggcggcagcgccgaaacggggagggcgtcaccaagcccggcgagcatcgcagcggttacggttttcacgaaatcaggggcggcatcggaaaccactggcggtcgattggcgctgtgcggatttaccggttgcaacggaacttcttctacggattcacgcgcgagcgccagagcctgccagttgcgttccaccagatcctggcctttgctactgtaacttttggcaatcgcaccctgcaattctgcgagggcgctatcgccaggcagaatttgcgtcagatggaaaaaagccatctgcatgacggtattaatacgggccgccaggccacattcgcgggcgattttcgccgcgttaatcacatagaagcgcgcttttttctggtttaacacggcctgaacttcttgcggcaagcgcgaccacacttcatctgcgctgtacggcgtgttgagcaggaaaatgccgccaggttttaaacgctcagccatctgatatttatcgataaactgcaactggtggcagccaacaaaatcagcctgggaaatgagataagcggaacgaatcggctgttcgctcactcgaaggtgagaaaccgtcaggccgcccgcctttttggagtcgtaaacaaaatagccctgtgcgtaccacggcgtggaattaccgataatcttgatattgtttttggtcgcggaaacgctgccatcactaccaaggccataaaacaaggcttccagtttcgccgagtttggcagggtgttttccggcaacggcagtgacagattggtcacatcatcgtaaataccaaccgtaaagcgcgctttcggtttagccgcgttgagctcggcaaataccgccagtacacagtctgggccaaattctttggatgaaagaccatagcgcccaccaatgacacggggcagagtttcgcgctcgccattattaaaggcttctgccagtgcggtcattacatccagatagagcggttctgcctgggcaccgggttctttggttctgtccagtaccgccacgctgcgtacggatcccggcagagcttgcagtaaatgtttagcggagaaggggcggtacaggcgaactttcagcacgccaactttttcgccacgggttagcaattcatcaaccacttcttcacaggtgccaatggcagagcccatcaggataatcacccgttccgcttgcggatgcccgtaatattcaaacggctgatactgacgacctgtcgcggcagagaaatcattcatcgcctgttcaacatggtcatagaccgcgttgtaccatgggttggtggcttcgcgagactggaaataagtgtcaggattggcggacgtaccgcggatcaccggatgttccgggttgagtgcccgggcgcgatgagcatcaatttcgacctgcggcatgagatcaagaatcgtgtcatcggccagcgggacaattttattgatttcgtgggacgtgcggaaaccatcaaagaaatgaataaatggcacgcggcttttcagcgtcgcgatttgcgaaatgagagcaaagtcttgcgcttcctggacgtttgctgcacacaacatcgcgcaacccgtctggcgcaccgccataacgtcggaatgatcgccaaaaatagagagtgcatgtgtggcaacggtacgtgccgctacatgcaggacaaacggtgttagttcgcctgccagtttgtacagcgtcgggatcatcagcagcaaaccctgcgatgacgtaaacgatgttgaaagggcacccgtctgcaaagcgccatgcacggtagcgatagcacccgcttccgactgcatttcaaccacgcgtggtgtgtctccccaaacgttctttaagccgtttccggcccaggcatcagcctgttctgccatcgtggaactgggggtaatagggtagatggcgataacttcactggtgcgaaatgcgaccgaagcaaccgcgccattaccgtcaatagtaatcatatgacacccttacattgcgcaaatgaggggcgcacgaaattgctgcgcgcccagtagtaatctttcaattttagcaaatggctttcttctgcattttcgcttttgtgtcccccacatcagcgtaatgaatgttttgatcaaacagagggcaaaaaaatagccataaaaaagtaaaaatgcggggcaacgcgcaggacagctctcgacgccgccctctgtgctgcctattatttatggcggtgtcgtttggcttgaagatcagaggaagaaaagatgcgagcagcgttttgggtagggtgtgccgctttattgttgtcggcgtgtagtagtgaacctgttcagcaggcgactgccgcgcacgtagcgccaggtttaaaagcgtcgatgtccagtagtggagaagcaaattgtgcaatgatcggcggttcgctttctgttgcccgtcaactggatggtacggcgattgggatgtgtgcattacccaacggcaaacgctgtagcgaacagtcacttgccgccgggagctgtggcagctattaattcattaaatccgccagcttataagttaatgtctgttttgcggtcgccagcgttaactggttcgcggtcagatccacttgtgcaccttctttcagcatttcgctaatggtgttatcgagttcattaagctgcgggttagcgcacatcatacgggtcattgccagccctttggctgtcagttcaccattagacagtttgccttcaccgctaaagcggttacacatgctgccggaaatcatcattttttcaccaaagctgatttctggcggatttttatcgctggtcacgggcttaccgtttacgctttccagcacaaagcgatgatgctgtagctgttctggcgtaacagcaattttgtcattacttacacatcccgccatcagcaggcttagcgcaacaaacgcggctactttcttcattgtggttctcaattacagtttctgactcaggactattttaagaatagaggatgaaaggtcattggggattatctgaatcagctcccctggaatgcaggggagcggcaagattaaaccagttcgttcgggcaggtttcgcctttttccagattgcttaagttttgcagcgtagtctgagaaatactggtcagagcttctgctgtcaggaatgcctggtgcccggtaaacagcacgttgtggcaggcagacaggcgacggaatacgtcatcctggatcacgtcgttggatttatcttcaaagaatagatcgcgttcgttctcatacacgtccatacccaacgaaccaattttctgatttttcagcgcttcaattgctgcctgagaatcaatcaatgcaccgcgactggtattgacgatcatcacgccatttttcatctgttcgaaggcggcttcgttcaacagatgatagttttccggtgtcagcgggcagtgcagagagataacgtctgattcagagaacagggttggcagatcgacatactccacaccgagttccagcgccgctgcacttggatacggatcgaacgccagcagacgcataccaaaacctttcagaatgcgcagcatcgccacaccgattttaccggtaccgataacgcctgccgttttgccatacatagtaaagccggtcagaccttccagagagaagttagcatcacgggtacgctgatacgcgcggtgaatacggcggttcagcgtcatcatcataccgatggcgtgttcagcaacggcctctggatcataggctggaacacggactactttcagccccagttcttttgccgcgtcaaggtcgacgttattgaaaccggcacagcgcagggcgatatatttaacgccgtgctttttcagctcttccagcaccgggcggctgccgtcatcgtttacgaaaatacataccgcttcgcagccattggcagttttagcggttttttccgtcagcagaaagtcaaaaaattccagctcaaagccaaaggactcgttcacctgttgcaggtacttcttgtcgtactgttttgtgctataaacggcgagtttcataagactttctccagtgatgttgaatcacatttaagctactaaaaatattttacaaaatttcaaatttaattgaaagctatggcgatattgaaaaattcatcaacaactatgcttagtgtaggcgcaaccttcaactgaacggttaaacatgccacaatacccgtattgaatgcttaatttttcgctaaatcaggatattaactacccatgctgggtaaatataaagccgttctcgcgctgttattactgattattcttgtgccgttgacgctgctgatgacgctcgggctgtgggttcccacgctggcgggcatctggctaccgctcgggacacgtattgcattagatgaaagcccacgcattacgcgtaaaggtttaatcattcccgatctccgttatctggtgggagattgtcagcttgcgcatatcaccaacgccagcctttcacatcccagccgctggttattgaacgtcggcacggtagaacttgattctgcttgtctggcgaaattgccgcagacggagcaatcgccagccgctccaaaaacactcgcgcagtggcaggccatgctgcctaacacctggatcaatatcgataaactgattttttctccctggcaggaatggcagggaaaactctctctcgcattaacctctgatatccagcaactgcgttatcagggcgaaaaagttaaatttcaaggccagctgaaagggcaacaacttacagtcagcgaactggatgtcgtcgcgtttgaaaatcagccgccggtaaaactggtgggggaatttgctatgccgctcgtgccggatggacttcctgtaagtgggcatgctactgcgacgttaaacttgccgcaggaaccgtcactggtggatgccgagctggactggcaggaaaatagcgggcaattgatcgtgctggcacgggataacggcgatccgttgctcgatttgccgtggcaaattactcgtcaacaattgaccgtaagcgatggtcgctggagctggccgtatgcaggttttcctttgagtggccgactgggtgtcaaagtcgacaactggcaggcagggcttgagaacgctctggtcagcggacgactgagtgtgctgacccaggggcaagcgggtaagggcaacgcggtgcttaattttggcccaggaaaattaagcatggataacagtcagctgcctctgcagctgaccggtgaagcgaaacaggcggacctcattttatatgcccgtttacctgcgcagctaagtggaagtctgtctgacccaacgctgacctttgagccaggcgcgttacttcgttcaaagggaagagtcatcgattcgctggacatcgatgaaatccgctggcctttagcgggtgtaaaagtcacccaacgtggtgttgacggacgtttgcaggccatcttgcaggcgcatgaaaatgaactgggcgatttcgtgctgcatatggatgggctggcgaatgattttctccctgacgctggccgctggcagtggcgctactggggaaaagggagttttacaccgatgaatgccacctgggatgtcgcaggaaaaggtgagtggcatgacagcacgattacgctgaccgatctctccaccggtttcgaccagttacaatacggtacgatgacggtagaaaagccgcgattaattctcgacaagcccatcgtctgggtacgtgacgcacagcatccctcctttagcggcgcgctgtcactggacgccgggcaaacgctgttcactggcggcagtgtgttaccgccatcaaccttaaaatttagcgtcgatgggcgcgatcctacctatttcctctttaaaggcgatttacatgctggtgagattggcccggttcgggtaaatggtcgctgggacggtattcgtctgcgcggtaacgcctggtggcctaaacaatcactgaccgtattccagccgctggtgccacccgactggaagatgaacttacgcgatggtgaactgtatgctcaggttgcattttctgctgcgcctgaacaaggattccgcgcgggaggacacggcgtgttgaaaggcggtagtgcctggatgccagataatcaggttaacggtgtcgattttgtcctgcctttccgttttgccgatggagcctggcatctggggactcgcggccccgttacgttgcgaattgccgaagtgattaatctggtgacagcgaaaaatattacggctgatttgcaagggcgttatccgtggactgaagaagaacccttgctgttgactgatgttagcgtcgatgtgttaggcggtaacgtactgatgaaacaattacgtatgccgcaacataacccggcgctgttgcggctgaataatctctcatccagcgaactggttagcgccgtcaatccgaaacaattcgccatgtccggggcatttagtggtgcactgccgttatggctgaacaatgaaaaatggattgtgaaagatggctggctggcgaatagcgggccgatgacattgcgactggataaagacactgcggatgcggtggtaaaagacaatatgactgcgggttcagcaattaactggttgcgctatatggaaattagccgttcatcgacaaaaattaatttagataatctcggtttattaaccatgcaggccaacattacaggtaccagtcgcgttgatggtaaaagcggtacggtaaaccttaattaccatcatgaagagaatatttttacgctgtggcgcagtttacgctttggcgataatctccaggcatggctggagcagaacgcacgtctgccgggaaatgactgtccgcaaggaaaagagtgtgaggaaaaacaatgaaaattttactggctgcgttgacgtcatcttttatgctggttggctgtacgcctcgcattgaagtcgctgcacctaaggaaccgatcactatcaatatgaacgttaaaattgagcatgagatcatcatcaaggcagacaaagatgtcgaagagctgcttgaaactcgtagcgatcttttctgaggtgatgatgaagaaaacattacttctttgtgcgtttcttgttgggctggtaagcagcaatgtaatggcattgactctggatgaagccagaactcaggggcgggtaggtgaaacattttacggttatctggttgcgctgaaaacggatgctgaaacagagaaattagtagccgacattaatgccgaacgtaaagcgagttaccaacaactggcaaagcaaaataatgtgtcggtagatgatatcgcgaaactcgccgggcaaaagctcgtagctcgggccaaaccgggggaatatgtacaagggataaacggtaaatgggtgcgaaaattttaatagcaaaaccgcaatatcgggataacgctacaggagaaggcgattgatctattttcctgaaacaaggtgaatattcaaaaactcctgtcaaattgccttttgccctgaaaaatgcatagtcaaatatctgttttaactaattggcgttgcagtacatgcaacgccaattagttagcggaatttacgtcgatactcgcctggcgtcatcccaaagcgttgcttaaataccgttgaaaaatgactctggtcagaaaatccccaatgaaagccgatgcctgccagtttttcatcatctgcggcatggcgaatcgcatctgcacaaaaatcgagacgacggttacgaatatattgcgcgactaccaaacctttatcggcaaacattcggtacaaactacgtactgacatacctgtctctccggctatccactccgggcgtaatatctcttcgcgaatattatcgtctatcaacgtaaccactttttgaaactgacgttcacgacgaggttgaacagattcccgctgatgaagtaccgggcgcagcagacacaccatcgcctgtagcgcagcttcactttctgtttcagaaagtgccggattattcatgctctcctgtaacaggcgatgactgagttgcaccatgggtaagtcagcgtccagtctttctgcgcagacaggtttttgatggggaaaatattgttccagcagagtgcgtggcaaaagtaatgaaatctgtttagaagactcctgccagtaaagcgaacaggggcgtgaggcatcgagtaacgtaatatcgccagcgccaatctgcacctgacgctcatcctgctccattattgcctgaccactaagctgaaaaacggtgtaaaaccaggcatcgtcgctgccttttacttcctgccaggtgcgggataaattcaccccgatggttgtcacggtactcagctttagtcctttggcaaaatgcgtgtccagtacacccgtgtaacgctcagtcagcaggcgtccggtaaaatttccgcatacctgattgatttgggaaagccattgctgaaactcattatccactgcggggttcatggcacgttttcgctctgtgaaatgtatttttattgttgcatttgtgttgcaataaacgaagctaatgagcctgactataggaaataagtcttgtcaggcatagagacataagcggttattgtcacgatttgcggagcttgtcacagctgacaaagcgaatgtcacagcgaaaaaagtgacttttcttgtcgctgcgtacactgaaatcacactgggtaaataataaggaaaagtgatgacagagccgcatgtagcagtattaagccaggtccaacagtttctcgatcgtcaacacggtctttatattgatggtcgtcctggccccgcacaaagtgaaaaacggttggcgatctttgatccggccaccgggcaagaaattgcgtctactgctgatgccaacgaagcggatgtagataacgcagtcatgtctgcctggcgggcctttgtctcgcgtcgctgggccgggcgattacccgcagagcgtgaacgtattctgctacgttttgctgatctggtggagcagcacagtgaggagctggcgcaactggaaaccctggagcaaggcaagtcaattgccatttcccgtgcttttgaagtgggctgtacgctgaactggatgcgttataccgccgggttaacgaccaaaatcgcgggtaaaacgctggacttgtcgattcccttaccccagggggcgcgttatcaggcctggacgcgtaaagagccggttggcgtagtggcgggaattgtgccatggaactttccgttgatgattggtatgtggaaggtgatgccagcactggcagcaggctgttcaatcgtgattaagccttcggaaaccacgccactgacgatgttgcgcgtggcggaactggccagcgaggctggtatccctgatggcgtttttaatgtcgtcaccgggtcaggtgctgtatgcggcgcggccctgacgtcacatcctcatgttgcgaaaatcagttttaccggttcaaccgcgacgggaaaaggtattgccagaactgctgctgatcacttaacgcgtgtaacgctggaactgggcggtaaaaacccggcaattgtattaaaagatgctgatccgcaatgggttattgaaggcttgatgaccggaagcttcctgaatcaagggcaagtatgcgccgccagttcgcgaatttatattgaagcgccgttgtttgacacgctggttagtggatttgagcaggcggtaaaatcgttgcaagtgggaccggggatgtcacctgttgcacagattaaccctttggtttctcgtgcgcactgcgacaaagtgtgttcattcctcgacgatgcgcaggcacagcaagcagagctgattcgcgggtcgaatggaccagccggagaggggtattatgttgcgccaacgctggtggtaaatcccgatgctaaattgcgcttaactcgtgaagaggtgtttggtccggtggtaaacctggtgcgagtagcggatggagaagaggcgttacaactggcaaacgacacggaatatggcttaactgccagtgtctggacgcaaaatctctcccaggctctggaatatagcgatcgcttacaggcagggacggtgtgggtaaacagccataccttaattgacgctaacttaccgtttggtgggatgaagcagtcaggaacgggccgtgattttggccccgactggctggacggttggtgtgaaactaagtcggtgtgtgtacggtattaatctggttcgctcataagtaaaaaacggcacctggtgccgtttttttgtctgaaacaatcacttatctttcttcagcgcccctagcgttggcgtttcgtcaaagaagttccatggtttcagcagagtatgtacccattcggtcggcataatcggccactcttcggcgcgggccacatgtgtggtgccggtggtcatccagacaacggcgtcggtgttgtccagcgactcgttatccttactgtattgtccaagaccggtgtcatgagtagaacggttcggatatttgccttccgggaaacgctcgccaggatgataacgcgttacccagagctgcttgtccataaagcttaaacgatgatagatccactcgtccggcgcgaactgggcaccttttgctaccgggtgagtaccacctgcataaggaataatttgataggaaaccggattgcccatgcggttctctttgttcgggttactcaacagacgaatcgtgcccggatcaaatttctgtgcggcatcctgttcattgccgatgttgtactgattaacttgcatggtactggtgcgtgggccaccggcagtattcggttttaccactgggtccatcgccactaggctgttattctcgccatctacatccagatcgaggcggaaattataaatatgttggtgtgtagtacccacgatattgtgatcgataagcgtgccgtagcgcgtgtcatctttcgccgtctcatcgtgcatggttttcgctttaacacctttcaccgcttcgatgcccgtagcaccggcatcgatgccaatagtgccgttttcatggaagaaccagtcaaaaatgtagtcatagttacccactgtactgatccagcgcaccactaactcccggcgttcggtactgacgttgggctggcccatttcctgatgcttatactccggcccggcataacgttcaaataccgcgatagcgcgagggatctccatcggcacgccagtgtagtcggcgatggtttcattaaggagcactgcgttagacggggcatctttaccacgagcaattggtgaggttagcgtgcccataccgtagtcaccagagtccagatacgctttaaagtaccagccaatatcaggatcaccgtaaggcacaatcatgccgccgagagaaccttcgtacatgactttgcgtttggtgccattgtcgttataagtcacggtggagatcatcggcccgacgcgagagttcatgctgaggtgaaaatcccagttccgccagtgaatcatatcgccagtaatggtgtaatttttaccttcaggctcaatgatttgcataggcttaactgccggagcaacgcggtcacggccatcaaatgggcgtgcggtcattggcaccggaactaccggaccttcttcaatcttaacgatttttttctgttctaaatcaacgaccgccaccaggttttcgatgggatgtgcccagtagttgccatcaccgacatcaagatagctgatgactttgagcaaccgggcatcttgtttcaggccatctttaccatcgaaataacctacggtcagcggcgtggtaatcacttttttcgcatcagtaataccgcgtttcttcacggcagcggcaaattcttcactgttgttaataatgttctgcacactggcgaaatcatccagcaacaccataccgtgggcgtctttaatgggttgccaggagagcagtttgttgttttgcagatccaccaccgcttcgatgatatgtttgccgtcgagcataatgacgtcggctttgcgcggctggtcaaccggtttgttttccagcgcaaacgcccagacagcttctttatctggcggtagcagggagatctcagtaaaacgggtattgggtttgaagtccgcggaagctttaacaatttcaacggcctgtttaatttcgtccgcagttagcgcattaagtgggtgagggcgcttttctacctgaaaggtttgatccagcccggactggaaaacatcgttaataaaggtgtcagaaacccaggctttattgtctttcatcactaccggtacttgcagtgccagaggctgaccattaacaattgctgtttgcgcaccaggcttcactttcacgtacgcgccatctttaatcagggtaaagagctgggcgtagtcgtcccactgcacatcggcaccaaattctttaagcgttttatccattggcaccatatgcgcttcaccaccgtgggcaaataccggcgcttgccaggcgaaacttaaggcgactgccaacgccagggttgttttacgggcagaatacagagaggggcttcccattattaacctcgtcagatgttgtgttcttgttagcaaccgcgctctgtgggcggtttagtcaggttcacattatcagtactgatgcaaaggggattgcctgcacctgccaggttgtttggcaggtgtgccagcttttcatacagtggatgccctgaaaatagatgtacacattatgcataatgtgacaacgtcacaaaatttagtgaaataaaagggcaactattcgccgttgcccttcattcaccgattaatcgacaaaatcaccgtgctgcctggccaccagcgtcagaattgaatacagcgccaccggggtttgatgctgattgaatacctctaccgcccattccaccacacctgttggtttttcttctgcgctacgctgttttttcagcgtcttgcgcttacaggtgagacgcacctggatggtatcgcctggctttacgggttcgataaagcgcaagttttccagcccataattagcaatgaccggaccgacaccggcatcgacaaacagacccgcagccgcagaaagcacaaaatacccatgcaccacacgctcaccgaaaatagattcggcagcagcaatcttatccatatgcgcatagaaatgatcgccgctgaggcaagcaaagttaacaatatcggcctctgtcattgtgcggcggggagtcaacaggctgtcgcctggttgtagctcctcaaaatatttgcggaacggatgaatacgatcttcttcgactttcgcaccgcgcacccactgtttactgatagcggcaagcatcgtcggactaccctgaacagcggttcgctgcatgtaatgtttcaccgctcgtaaaccgcctaattcttcaccgcctcctgcgcgaccaggcccaccatgtaccagttgtggcagtggggagccatgcccggtggattcttttgccgactcttcattgaggatctgaattcgcccatgcgtacgtgccgcgtcggcaataaactgacgcgcaatttgcggatcagccgtcaccagcgttcccgcaaggctaccgccgcctgcacaagccagttgcagagcatgtcgctggttttgtgctggcatcagcgttgcgacagggccaaaggcttctgttgcatgtaccgccggtgtttcatccggctgcggacagtacaataaggttggcgggaagaaggcacccgcagcagataaatccgcctgaccaccgaggcgaatctcgcatcctgcagccagcaatatgttcactttttcctgcacatcggcacgctgctcagcatttaccagtgcgcccattttcacgccttcctgagcaggatcaccgaccacgactttctgtaatcgcgcaaccagagcatcactgacagcattaaccaatgcctgcggcacaataatccgccggattgccgtacatttttgcccggcttttgtggtcatctcacgcacaacttcacgaataaacagcgcaaactccggttgatccggggtgacatcttcgcccagtacgcagcagttcagggaatcagcttccatagtgaaggggatagatttggcgacgatatttggctgaactcgcagcatctgtccggtcgccgctgaccccgtgaaagtcaccacatcctggctgtccagatgatccaacaagtcgccagcactaccgcagatcagactaattgcgccttcgggaacaagaccactatcgacaattgatttcaccatcgcctgagtcagttgggccgtcgcggtagctggtttgatgatggctggcattccgcccagccacgttggtgccagcttttccagcattccccagcaggggaagttaaaggcgttaatatgcactgccacgcctgactttgaggtcagtaaatggcgcgcggcaaatccaccttctttcgataaggggatcaattcatcttccggccacagcgtatcgtcaggcagctcccggctaccgaggctggcgtaagtaaataacgtcccaatgccaccttcaatatcaacccaactgtctgcccgcgttgcgcctgtttgcgcagaaagagcatagaaacgctctttttcactcagcagatgtttagcgaccgctttaagcatcgccgcacgttcgataaaggtcatagcgcgaagggcgggggcacctttttcaatggcaaactggcgggcagccgccatatcaagaccttcactggtcacttcccataacgcctcgccgctaatagcgtggtgaatcaaacggctacggccccggccagactgccaggtaccggataagaaactggctaactgctgcatcgctactctccagatgtttcacatttctgttgctaatagttaaatcgcgaatcataaaaagcaagggatcttttaacgaaatgttaactatgcgatctgtatagcaactgcggaaaacattaatgcactgataaataatgatttataaaaatagggtgcgaaatccgtcacagttcaaacatacaaaatttgtgattttacttaactattgtgtaactttcataaaacaatgtgattcgtgtttttaattaattcacgaaaactggaatcgtaaaggtgatgacgtgacccaagaagaacgctttgagcaacggatagcccaggaaacggctatcgagccacaggactggatgcccgatgcttaccgaaagacattgatccgccagattgggcagcatgcgcactccgagattgttggtatgttgcctgaaggtaactggatcactcgcgcaccaaccttgcggcgtaaagccattctgttggccaaagtgcaggatgaagccggtcatggtctgtatctctatagcgccgccgaaacactgggctgcgccagagaagacatctaccaaaaaatgctcgacggacggatgaaatattcctccatctttaattatccgacattgagttgggctgatatcggtgttatcggctggctggtggatggcgcagcgatcgtcaatcaggtggcgttatgccgcacttcttatggcccgtatgccagagcaatggtgaaaatctgcaaagaagagagttttcaccagcgtcaggggtttgaagcctgcatggcactggcgcagggcagcgaagctcaaaagcagatgttgcaagacgccattaaccgtttctggtggccagccttaatgatgttcgggccaaacgatgataactcgccaaacagcgccagaagtctcacctggaaaatcaaacgtttcaccaacgacgaactccgccagcgtttcgtggataacaccgttccacaggttgaaatgctcggtatgaccgttcctgacccggatctgcattttgacactgaaagcggtcactaccgctttggtgagatcgactggcaggagtttaacgaagtaattaacggtcgcggaatttgtaatcaggagaggctcgacgccaaacgtaaagcctgggaagaaggtacctgggtacgggaagcagcgctggcccatgcacaaaaacaacatgcccgtaaggtcgcataaggagattcaaaatgagtaatgtttactggccgttatacgaagttttcgtgcgtggcaaacagggcttatcacaccgccatgttggcagtttacatgctgccgatgagcggatggcactggaaaatgcccgtgatgcttacacccgtcgtagcgaaggatgttcaatttgggtggtgaaggcgagtgaaattgttgcctcgcaaccggaagaacgcggtgaattttttgatccggctgaaagcaaggtctatcgccatccaacgttttacaccatccctgatggcattgagcacatgtgaggtcggaaatgaatcagttaacggcttacaccttgcgcctgggcgataactgcctggtgctctcccagcggttgggtgaatggtgcggtcacgcaccggaactggaaatcgatctcgcactggcaaacattggcctcgatttattaggtcaggcacgcaacttcttatcgtatgccgctgaattagcgggagaaggcgatgaagataccctggccttcacccgagacgagcgccagttcagcaacttattgttagttgaacaaccaaacggcaattttgccgacaccattgcacgccagtatttcatcgatgcatggcatgtggcgctctttacccgtctgatggaaagccgtgatccgcaactggcggcgatttctgccaaagcaattaaagaagcgcgctatcacctgcgttttagtcgtggctggctggagcgactgggcaatggtactgacgtatcagggcaaaagatgcagcaggccatcaacaagttgtggcgttttaccgccgaactgttcgatgccgacgagattgatattgcactgagtgaagagggtattgcggttgatccacgcactttacgcgcagcgtgggaagccgaagtttttgccgggatcaacgaagccacattgaacgtaccgcaagagcaggcgtatcgcactggcggtaaaaaaggactgcataccgaacaccttggacccatgctggcagaaatgcagtatctccagcgtgtcttgcccggtcagcaatggtaacagaggagatgggtatgcaacgtctggccaccattgcaccgccacaggttcatgagatatgggcgctactcagccagatcccggacccggagatcccggtgctgaccattactgatttaggcatggtgcgtaatgtgacacagatgggagaaggatgggtgatcggctttacgccgacatattccggttgtccggcaacggaacatttgattggcgcgatacgtgaggcaatgacaaccaacgggtttacccccgttcaggttgtgctgcaactcgacccggcatggaccaccgactggatgacccccgatgcccgtgagcgtctgcgagagtatggcattagcccgcccgccggacacagttgccatgcccatttgccgccagaagtacgttgcccgcgctgcgccagcgtccataccacacttatcagtgaatttggttccacggcctgcaaagcattgtaccgctgcgatagttgccgcgaacctttcgattatttcaaatgtatttgaggatgccatgacaacgtttcattccttaacagtggcaaaagtcgagtcggaaacccgtgatgcggtgaccattacctttgcggtgccccagcctttgcaggaggcgtatcgctttcgccccggtcaacatttgaccttaaaagccagctttgatggtgaagaattacgccgttgttactccatttgccgcagctatctgcctggcgaaattagtgtggcggtgaaagccattgaaggcggacgtttctcccgctatgcccgcgaacacatccgccagggtatgacgctggaggtcatggtgccgcaggggcatttcggctatcagccgcaggccgaacgccaggggcgctatctggcaattgcagcaggatcaggtattacgccaatgctggcgattatcgccaccactttacaaaccgagcctgaaagtcagttcaccctgatctacggtaaccgtaccagccagagcatgatgtttcgccaggcactggcagacctgaaagacaaatatcctcagcgtttacagttgttgtgcattttcagtcaggaaaccctcgacagcgatctgcttcacgggcgtattgacggtgaaaaattacagtcacttggggcctcgctcattaattttcgtctttatgatgaggcatttatttgtggtccggcggcgatgatggatgacgcggaaaccgccttaaaagcactgggaatgccagataaaaccattcatctggagcggtttaatacgcctggcacgcgcgtcaaacgtagcgttaacgtgcaaagtgacggacaaaaagtgactgtacgtcaggatgggcgggatcgggaaatcgtgcttaatgccgacgatgaaagcattctcgatgcggcattgcgccagggggcggatctgccctatgcctgcaaaggcggcgtctgtgcgacctgcaaatgcaaagtgctgcgtggcaaagtggcgatggaaaccaattacagtctggaaccggatgaactggccgcaggttatgtgttgagttgccaggcactgccgctgaccagcgatgtggtggttgactttgacgcgaaggggatggcatgagcgaactgatcgtcagccgtcagcaacgagtattgttgctgacccttaaccgtcccgccgcacgtaatgcgctaaataatgccctgctgatgcaactggtaaatgaactggaagctgcggctaccgataccagcatttcggtctgtgtgattaccggtaatgcacgcttttttgccgctggggccgatctcaacgaaatggcagaaaaagatctcgcggccaccttaaacgatacacgtccgcagctatgggcgcgattgcaggcctttaataaaccacttatcgcagccgtcaatggttacgcgcttggggcgggttgcgaactggcattgttgtgcgatgtggtggttgccggagagaacgcgcgttttgggttgccggaaatcactctcggcatcatgcctggcgcaggcggaacgcaacgtttaatccgtagtgtcggtaaatcgttagccagcaaaatggtgctgagcggagaaagtatcaccgctcagcaagcacagcaggccgggctggttagcgacgtcttccccagcgatttaaccctcgaatacgccttacagctggcatcgaaaatggcacgtcactcgccgctggccttacaagcggcaaagcaagcgctgcgccagtcgcaggaagtggctttgcaagccggacttgcccaggagcgacagttattcaccttgctggcggcaacagaagatcgtcatgaaggcatctccgctttcttacaaaaacgcacgcccgactttaaaggacgctaatgatggaattcatcctcagtcatgtagaaaagggcgtgatgacactaacgctcaaccgcccggaacgcctgaacagttttaatgatgagatgcacgcacaactggcagagtgcctgaaacaggtcgagcgcgacgacactatccgttgcctgttacttacaggtgccgggcgcggattttgtgctggtcaggatcttaacgatcgtaacgttgatcccacaggccccgcaccggatttagggatgtcagttgaacgtttctataacccactggtacgtcgcctggcaaaactgccaaaaccggtgatctgtgcagtcaatggcgtggcggcaggggcaggcgcaacactggcactggggggcgacatcgttattgctgcccgttcagcaaaattcgtcatggcgtttagtaagttaggcttaatacccgattgcggtggaacctggttactgccacgcgttgccggacgagcgcgcgccatggggctggcactgctggggaatcaactgagtgctgaacaggcgcacgaatgggggatgatctggcaggttgttgatgatgaaacgctggcagataccgcgcaacagctggcacggcatctggcgacacaaccgacatttggtcttggacttatcaagcaagcgataaatagcgctgaaaccaatacgctcgatacgcaactggatctggaacgtgactatcagcgacttgccgggcggagcgcagattatcgtgaaggtgtcagtgcgttcctggctaaacgctcaccgcagttcacggggaaatagcatgatgataaatgtgcaaactgtggcagtgattgggagcggcaccatgggggcaggcattgctgaagttgccgccagtcatggacatcaggttttactgtatgacatttctgctgaagcgctgacccgcgcaatcgacgggatacacgcgcggctaaattcacgcgtgacgcggggaaaactgaccgctgaaacctgtgaacgcacattgaaacgcctgatcccggtgaccgatattcacgcgctggcagcagcgaatctggttattgaagcggcgtctgaacgtctggaagttaaaaaagcgctctttgcacaactggcggaagtttgcccgccacaaacgctattgaccactaacacttcgtcaatctctataaccgcgattgctgcggaggtaaaaaatcctgaacgtgttgcggggctgcatttttttaacccggcaccggtgatgaagttggtggaggtggtcagtgggctggcaacggcagcggaagttgtcgagcagttgtgtgaactgacattgagttggggtaagcagccagtgcgctgtcattcgacccccggatttatcgttaaccgtgttgcgcgtccttattattccgaggcctggcgggcactggaagagcaggttgctgcaccagaagtgattgacgctgcacttcgcgatggcgctggtttcccgatggggccgctggaattaaccgagctgattggtcaggacgtcaattttgctgtcacctgttcggtgtttaacgctttctggcaggagcgtcgttttttaccttcgctggtgcaacaggaactggtgattagtggacggttgggcaagaaaagtgggctgggcgtgtacgactggcgcgcggaacgtgaggcagttgttggcctggaagcggtaagcgacagttttagcccaatgaaagtagaaaagaaaagtgacggtgtcacagaaattgacgatgttttattgattgagacacaaggcgagacggcacaggcgctggcaatacgactggcacgcccggtggtagtggtcgacaaaatggcgggcaaggtggtgaccattgctgcggcagcggtgaacccggactcagcgacccgcaaggccatttattacctgcaacagcagggcaaaacagtgctgcaaattgcagattacccaggaatgctgatttggcgaacggtagcaatgatcatcaatgaagcccttgatgcgctgcaaaaaggcgtggcctctgaacaggatatcgataccgccatgcgtcttggggtgaattatccatatggcccgcttgcctggggagcgcaacttggctggcagcgaatattaaggctcctggaaaatctacaacatcactatggcgaagaacgctatcgcccatgttcattgctgcgccaacgggcgcttctggagagcggttatgagtcataaggcctggcaaaatgcccatgcaatgtatgagaacgatgcctgcgccaaagcgcttggcatcgacattatctcaatggatgaaggctttgctgtagtgaccatgaccgtcactgcacaaatgcttaacggtcatcaaagttgccacggcgggcagctattttcactggctgatactgcctttgcctacgcctgcaatagccaggggctggcagccgtcgcttctgcctgcacgattgattttttgcgtccaggctttgccggagacaccttaactgctactgcgcaggtacgtcatcagggcaagcaaaccggtgtttacgacatcgaaattgttaaccaacaacaaaaaacggttgcgctgtttcgcggtaaatctcaccgcatcggcggcaccattacaggagaagcctgatgcgtgaagcctttatttgtgacggaattcgtacgccaattggtcgctacggcggggcattatcaagtgttcgggctgatgatctggctgctatccctttgcgggaactgctggtgcgaaacccgcgtctcgatgcggagtgtatcgatgatgtgatcctcggctgtgctaatcaggcgggagaagataaccgtaacgtagcccggatggcgactttactggcggggctgccgcagagtgtttccggcacaaccattaaccgcttgtgtggttccgggctggacgcactggggtttgccgcacgggcgattaaagcgggcgatggcgatttgctgatcgccggtggcgtggagtcaatgtcacgggcaccgtttgttatgggcaaggcagccagtgcattttctcgtcaggctgagatgttcgataccactattggctggcgatttgtgaacccgctcatggctcagcaatttggaactgacagcatgccggaaacggcagagaatgtagctgaactgttaaaaatctcacgagaagatcaagatagttttgcgctacgcagtcagcaacgtacggcaaaagcgcaatcctcaggcattctggctgaggagattgttccggttgtgttgaaaaacaagaaaggtgttgtaacagaaatacaacatgatgagcatctgcgcccggaaacgacgctggaacagttacgtgggttaaaagcaccatttcgtgccaatggggtgattaccgcaggcaatgcttccggggtgaatgacggagccgctgcgttgattattgccagtgaacagatggcagcagcgcaaggactgacaccgcgggcgcgtatcgtagccatggcaaccgccggggtggaaccgcgcctgatggggcttggtccggtgcctgcaactcgccgggtgctggaacgcgcagggctgagtattcacgatatggacgtgattgaactgaacgaagcgttcgcggcccaggcgttgggtgtactacgcgaattggggctgcctgatgatgccccacatgttaaccccaacggaggcgctatcgccttaggccatccgttgggaatgagtggtgcccgcctggcactggctgccagccatgagctgcatcggcgtaacggtcgttacgcattgtgcaccatgtgcatcggtgtcggtcagggcatcgccatgattctggagcgtgtttgagcatatcaacctgcgagtaccctacaatgataaccaatacaaagcttgacccgattgaaaccgcgtctgttgatgagttacaggcgttgcaaacacagcgtctgaaatggacgctcaaacacgcgtatgaaaatgtgccgatgtatcggcgcaaattcgacgcagcaggcgtacatcctgatgatttcagggaactttcagacctgcgtaaatttccctgtaccaccaaacaggatctgcgcgacaactatccctttgacacctttgccgtgccaatggaacaagtggtgcgcattcatgcttcttcgggaaccacaggtaaaccgacagttgtcggctatacgcaaaacgatattgataactgggccaatattgtagcgcgttctttgcgtgcggcagggggctcgcccaaagacaaaattcatgttgcctatggttacggcctgtttactggtgggctgggtgcgcactatggtgccgaacgtctgggcgctacggtgatcccgatgtctggcgggcagacggaaaaacaagcgcaactgatccgtgattttcaaccagatatgatcatggttacgccatcttattgccttaacctgattgaagagctggagcggcagttgggcggtgatgccagcggttgctcgctgcgggttggagtatttggtgctgagccgtggacacaggccatgcgtaaagagattgagcgtcgcctggggatcaccgcactggatatttatggcctgtcagaagtgatggggccgggggtggcgatggagtgtctggaaactaccgacggcccaaccatttgggaagatcatttctatcctgaaattgttaatcctcatgacggcacaccgcttgccgatggtgaacatggcgaactgttattcaccacgctgaccaaagaagcattgccggtcattcgttaccgcacgcgtgatttaacccgactgttaccaggaacggcgcggactatgcgccgcatggatcgcatcagcggacgcagcgatgacatgttgattattcgcggtgtaaatgtctttccgtcacaactggaagaagagattgtcaaattcgaacatttatcgccgcattaccaactggaggtgaaccgccgggggcatcttgattcactttctgtgaaagtggagttgaaagaaagtagcctgacattgacgcatgagcagcgttgccaggtatgccaccagctgcgccatcggattaagtcgatggtggggatctctaccgatgtgatgatcgttaactgtggcagtatcccgcgttcagaaggcaaggcgtgtcgggtgtttgatctgcgcaatattgttggtgcctgacgtatcgtctggccctggtggggtaaagcgccagggccagaagtcgatacgacctgtgctatgattcataaatcacaacaataacaacagactgaagcgaatgagtaaacttgatacttttatccaacatgctgtaaacgctgttccggtcagtggcacatctttgatctcctctctgtatggtgattcgctttcccatcgtggtggtgaaatctggttgggtagtctggctgctttgctggaagggctgggatttggtgagcgtttcgtgcgcaccgctttgtttcgtcttaataaagaaggctggctggatgtttcccgcatcgggcgacgcagtttctatagcctcagtgataaaggcttgcgcctgacgcgacgggcagaaagtaaaatttatcgcgcagagcaacctgcatgggatggtaaatggctcctgttgctctcggaaggtttagataaaacgacgctggctgatgtcaaaaagcagttgatctggcaaggttttggcgcactggcacccagcctgatggcatcgccgtcgcaaaaactggccgatgtacaggcacttttgcatgaagcgggggtggcggataacgtgatttgttttgaagcgcaaataccactggcgctttctcgcgcagcactgcgtgccagagtaaaagagtgctggcatttaactgaacaaaatgccatgtacgaaacctttattcagtcattccgcccgctggtgccgctgttaaaagaggcggcagacgagttaaccccggagtgggcatttcatattcagcttttactgatccatttttatcgccgtgtcgtccttaaagacccattgttgccggaggagttgcttccggcacactgggcagggcatacggcacgtcagctgtgtatcaacatttatcagcgcgtagcgcctgctgctttagcgttcgttagtgaaaaaggtgaaacctcggtcggtgaactgcctgcgccgggaagcctgtattttcaacgttttggcggcttgaatattgaacaggaggcgttatgccaatttatcagatagacggtctgactccggttgtgccagaagagagttttgtccatccgacagcggtattgatcggcgatgttattctcggcaagggcgtttacgttgggccaaatgccagtctgcgtggcgattttggtcgtatcgtggtgaaagatggcgcgaacattcaggataattgcgttatgcacggttttcccgagcaggatactgtcgttgaagaagatggacatattggtcatagcgctatccttcacggctgcattatccgccgcaatgcattagtgggaatgaacgcggtagtgatggacggtgcggtgattggcgagaacagcattgttggcgcatccgcatttgtgaaagccaaagcagaaatgcctgctaattacctgattgtcggcagcccggcgaaagcgattcgtgaacttagtgagcaggagctggcatggaaaaagcagggtacgcatgagtatcaggtgctggtgacacgctgtaagcagacgttacatcaagtcgagccattgcgggaaattgaacctggcaggaaacgcctggtatttgatgagaatctgcgaccgaaacagtaacgtcctgatgctggacgttctaatttttagcatgtgatccctaaaccgcaacgctgatacaggttgcggtttttttattgccggatgcggcgcttgacgcgttttgttttggtgtctttcaggataacagagcaactcatccagtaatcttgtttacaccttcgcattatttatctcttttcgtttctatactgatttttcttaatccgttttattacagggcagggtgcgatgagcagcaacacatttactctcggtacaaaatccgttaaccgtcttggttatggcgcgatgcaactggcaggtcctggagtttttggccccccacgagatcgccacgtcgctataaccgtgctgcgtgaggcgctggcattgggcgtcaatcatattgataccagcgacttttatggtccgcacgtcaccaatcagattatccgcgaagcgctttatccttactctgacgacctgacaattgtcactaaaattggtgcgcggcgtggagaggacgcatcctggttgcccgcattttctccggcagagctgcaaaaagcggtgcacgataatctacgtaatctcgggctggacgtgctggatgtggttaacctgcgcgttatgatgggggatggtcatggcccagcggaaggatcgattgaggccagcctgaccgtgctggcagagatgcaacaacaaggcctggtaaaacatattggcctgagcaacgtcacaccgacgcaggttgcagaggcgcgcaagattgccgaaattgtctgtgtgcaaaacgaatacaacatcgcgcaccgtgctgatgatgcaatgattgatgctttggcccacgatggcattgcctacgtgccgttcttcccgctcgggggctttacaccgctgcaatcgtccacactttccgatgttgctgcgagcctgggtgcaacaccaatgcaggtggcgctggcgtggctgttacagcgttcaccgaatattttgctgatcccagggacgtcttcggttgcgcatttacgggagaatatggctgctgaaaaattgcaactttctgaggaagtgttgtctacgttggatggtatttcgcgagaataacgaatatacaaaagggaaagatgcatttcccttttgtttcttttttaatggcatggagtgcatatgtttaaggccaggatttgcggctggataggtttacttcccctgtttatgctgagtcttccagtacaggcggaacttcgatgtgttgcaaatgcagttgatattgaacaatttttttctgcggctaccgctgaagataaacaacaagttgaacaagctatcaacagtagcgtgaatcttgtccccttcggtttatctgcatcggactggaaagtgcatcgtggcgatttagtggtagaaggtaatatagagagtaatcaaaaattgattgttcttggcaatttgacagtcaaaggaaatatttccactttctctctttctaatccatgggttattctcggtaacgtgacggcaacgaatatagttacggattcaccactgttaattaccggttcgataaatgcaagtggactggtatttatcgactcatattacgataatccgtctacgattaaggggagtattaatgcgcgtgggatatttatcaatgacataattgcacctgttgttgcgtcttcgacaaatagtgaattcatggtccgtgcgagtgacaaaaatgacactgaaaatgtcaaaaaagcgctgatgataataaatcctgatgcatattattggggtctaataaatgatgaagatgctctgaaagaaatttttaagcgaagcaatattcgcatggcagggaatgtctgtaatcagatgaaaaaagaagcgctgtttcgccctaagccttctcctgagttagtgcaggaattgcaaatgctggatgaaggcaacgttgctgcatttgaaggacgagatattgcgacatttgatcttgccataatccgaactctcccaaggcttaaaggaatttcagctaacctacgcaaacaacttattaatagcaatgatgaacaaacgattgaaagtatggcgagatatatgcctgacaatgagattctggagttgaccgatcagcaattgggttaccagcctgttgttctggggttgctcgaccgtgaaccgctctctgtcgaaataatgacgcgaatgagtcgtctacctgatggtgtcggtccgttgaatcttgcgctacgtgaaaatctccctctggatatcgtaatgactctggcgaaaagagattgggatatgatcattcaggagctttataaagatgcgtggttattgcctgaatccattattgatggctatatccgcagtgatgattcctctattcgtcaggtcggtgctggaggacaactcacctacaatcaggcaatgcagttggcgaacgattcatcaaacaatgttgtcacaagcttagcgttcaagctggcagagatgaaacaccatggtcaattattgcggatgacgccacaagagagtgacaaagttgcagcctatttataccaaaaattcgagaatgacgatgatctaatacgtgtgttatttttagcattgccagataacttacagtttaattttgttaaaaggatggagaaaaaatcccctgcctacttttgctgtcgggatatgcaggtaattcactctgacgctgctctacaacggttattgacacgtttcaacgatcctgaggggtggagtaatctggcgaaaaatcagtatctgagcacgtcgatgaaacaaaaaatttggcaacgtgctttatcgcatcggaaaaataatccgaaagcagattcagctgcgtatgaaaccagcgctgatatgattttgtctgagcttatcagccacggtgaagttgatgatcagatgctattaaatgccacagccctgatacgtttggaagactgggactttttagagagtgcattagttagttgggataatttacccgctgttgtcctcaaggaattacagcaaaatacgccacgcaatgatatttgggcgaagttttttctgaggcaggaaaacagctcccgtgcgcaggttgatgaagcattacgcgtctattatgcactcgaccccgatgcgttagcacaactggatgtactggcaaaacaaccggatcgtatatggtggagtacactggcgaaaagcaatctcacatttttcaagttcggcgcacttaacaaccgccacacaccgcctgcagtactggcggcagaaattgatcccgagtggtggattgtggcgatgaataatccccgttttccagttgatgtattaaaggcgaggctgaaacgtgatcctttgctggcgttagagcttgttaaccctgaactggatttagtccgccagctggcgcttaacggtaagacgcgcgcaatacgggaacaagcgatgagaaaacttgatgagttgtattgatccacaacgtaatatttcttaaccctttgattaattggggataattattcctgacagtgagtccccaataccttgatatattctgaatttttaatgaagcggcgtgttgcgatatctccgtcaggggaattgatgcaccatagcgcaaaccgaattatcaaggattgataatgacgctctaccagataaaaccgctctttcagacgctattaagaccgacgatgttttggctttataagcaccatgttacagcgaatcacatcaatcttgctgcactggcgctttctcttattaccggattgctgttgatgttggtcgcacaacccatcctctttttgctattgcccatcgtgctttttatccgttttgctgccagtgacagccaggtcggactggatgaggtggtagtgatcgcgcaaagcgtcggcgcagtgctggttgccacatgggttcatgattatgcacctgcaattcgcgggctggtactggcttctccggcctttaaggttaaattgtatgtgccgctggcacgtcctgtgctggcgttatggcatcgtctgcgtggtctgttttttattaattcctatgtgaaaggacgctatttgacccacgatcggcaacggggggcgagtttcaataatgatccgctgatcacacgggcgattgccgttaatatcttgctcgatctctacaaaacgtctgaacgtattattagagatgcggcggcgattacgctccccacgcaacttctgatatcaggcgatgactatgtggtgcatcgccaaccgcagattgatttttatcagagattacgtagccctctgaaagagctgcatctgctgccaggcttttatcacgacacgttgggtgaagagaacagggcgctggcatttgaaaaaatgcaaagctttattagtcgtttatatgctaacaaatcgcaaaaatttgattatcagcatgaagactgcacaggaccatcagcggatcgatggcggctactttctggtggacccgtgccattatcgccggttgatttagcgtatcgctttatgcgaaaggcgatgaaattgttcgggacgcattcttcgggcctgcatctcggaatgagcaccggctttgattcaggcagttcgctggattatgtctatcaaaatcaaccgcaaggtagtaacgcattcgggcgtttagtcgacaaaatctacctgaacagtgttggctggcgcggtattcgccagcgcaaaacccatttacaaatactgattaaacaagccgttgccgatctccacgccaaaggtttagccgtccgcgtggttgacattgccgcagggcatgggcgctatgtactggatgcgctggcaaacgagcctgccgtaagcgatattttgttacgtgattacagcgagttaaatgttgcacaggggcaagagatgattgctcaacggggaatgtctgggcgggtgcgttttgaacagggcgatgcgtttaacccggaggaactcagcgcgttaactccgcggcctacgctggcgattgtctctggcctgtatgagctttttcccgaaaatgagcaggtaaaaaactcactcgcaggtcttgccaatgccatcgaaccgggcggcattctcatctacaccgggcagccgtggcaccctcaactggagatgattgccggggtgttaaccagtcataaagatggtaaaccgtgggtaatgcgcgtgcgttcgcaaggggagatggattcactcgtgcgtgatgccggatttgataaatgcacacaacggattgatgagtggggtatttttacggtttcgatggcggtgcgtcgtgataactgaacgtcggaacgtattgctacaaggcgctggctggttattgttgctggccccgtttttcttcttcacctatggatctcttaatcagttcaccgcggttcaggaccttaacagccatgatatccccagtcaggtattcggttgggaaacggcgatcccttttcttccctggactattgttccttactggagtctggatcttttatatggattttcgctgttcgtttgtagcacgacattcgaacagcgccgacttgtccaccggcttattctggcaacggtaatggcctgctgcggttttttgctctatccgctgaagtttagttttatccgtcctgaagtgagtggggtgacgggatggctattttcgcaacttgaactgtttgatctgccttataaccagtctccttcgctgcatattattctctgctggctactttggcgtcactttcgtcagcatctggctgagaggtggcgtaaagtctgcggcggatggtttttactcatcgccatttcgacgctgacgacctggcagcatcattttattgatgtcatcacagggctggcggtaggtatgttgattgactggatggtgcccgtcgaccgtcgttggaattatcagaaacctgatcaacgtcgaatcaaaatagcactgccctatgtcgtaggcgcgggctcgtgcattgtattgatggagctaatgatgatgattcagttatggtggtcagtctggttatgttggccagtattatcgctactcataattggccgtgggtacggtgggcttggcgcgataacaacagggaaagatagtcaggggaaactaccgcccgccgtttactggctgacattgccctgccgcatcgggatgtggctgtctatgcgttggttttgtcgtcgcctggagccggtgagcaaaatgactgctggtgtttatttaggggcgtttccacgacatattccggcacagaatgcggttctggacgtcacctttgaattccctcgcggacgagcgacaaaagatcgactctatttctgtgtaccgatgctggatctggtggttccggaagagggggagctacgacaggccgtggcgatgctggaaacattacgcgaagagcaaggcagcgttctggtccattgcgcattgggattatcgcgcagtgcgctggtagtggcggcatggctgttatgttacggacactgtaaaaccgttgatgaagcgattagctttattcgagccagacgctcgcatattgtgcttaaggaagagcacaaagcgatgttgaaattatgggaaaacaggtaagtggattgagatgtggactgaactacagtccacatcaagatcgtgtccggttatgcagcaacaatgctgtcgatggctgctttcgcgtcagactgcgctttcgctgccatttccggaccgtatgcgatcccttcggcgaagacaaaattcacatcggtaatgccgataaagccgaggaacgtggacagatacggcgtcaccaggtccgttggtccatctttgtggatcccgccgcggctggtaataacgatggcttttttacccgttaccagaccttccggaccgttctcggtatagcggaaagtaacgcctgcgcgtgcaaccaggtcaaaatagtttttcaactgagtcgagatattgaagttatacatcggtgccgcaataacgataacgtcgtgggctttcagctcggcaatcaactcatcggaaagcgccagagcttcttgctgacgaggagtcagcggcgcatcgctcggacgcagtgcaccaaccagttcgccatccagtaccggaatcggatttgcagccaggtcgcgaacggtgatttcatcagcggagtgcttttcgcgccattgttcaacaaaataatcggacaactgattagactgagagtaccctgccaggatgctggatttaagaactaataccttgctcatggtgtttccttatagatgtttgaatgggcgatgccccgttgcttgttgacactttattcacaatcctgccacagagatagcgcaataaatcgaagcctatgttcgaatttattgaacaacgcatagaaagccgcgatgtggtactctatatctatcatttaaaagaaaattaatcaggcagattactgcccactaacgttatgacagaacaacaaaaattgacctttacggccttgcagcagcggctggattcgctgatgctgcgcgacagactgcgtttttctcgccgtctgcacggtgttaagaaggttaaaaatcctgatgcacaacaggccattttccaggagatggcgaaagagattgaccaggcggcagggaaagtcctgctgcgtgaagcggcacgaccggaaattacttatcctgacaatttaccggttagtcagaaaaaacaggacattctcgaagcgattcgtgatcaccaggtggtgatcgtcgccggggaaacgggttctggtaaaacgactcagttaccgaaaatctgtatggagctggggcgcgggattaaagggctgatcggccatacccagccgcgtcgcctggcggcaagaacggtggcgaaccgtattgcggaagagctgaaaacggagccgggcggttgcatcggttacaaagtgcgtttcagcgatcacgtaagtgataacacgatggtcaagctgatgaccgacggtatcctgctggcggagatccagcaagaccgcctgctgatgcagtacgacaccatcattattgacgaagcgcacgaacgcagcctgaatatcgattttctgctcggctatttgaaagagttgctgccgcggcgtcctgacctaaaaatcattatcacttccgcgactatcgacccggaacgcttttcgcgccactttaataatgcgccgattatcgaagtctccggtcggacctatccggtggaagtgcgctatcgaccgattgttgaagaagccgatgacaccgagcgcgatcagttgcaggcgatttttgacgccgtagacgaactgagccaggaaagccctggcgacattctgatctttatgagtggtgagcgggaaattcgcgataccgccgatgcgctgaacaagctgaacttacgccataccgaaatcttgccgctttatgcgcggctttcgaacagcgaacagaaccgcgtgttccagtcgcacagcggacggcgcattgtgctggcgaccaacgtcgcggaaacctcgctaaccgtaccggggattaaatacgtcatcgaccccggtacagcgcgtatcagccgctacagctatcgcaccaaagtgcagcgtttgccgattgaacccatttcgcaggcgtctgccaatcagcgtaaaggccgctgtggtcgtgtgtccgaagggatctgtattcgtctctattccgaagacgatttcctctcgcgcccggagtttaccgatccggagattctgcgtaccaacctggcctcggttattttgcagatgaccgcgctggggctgggcgatatcgctgcgttcccgtttgtcgaagcaccggataaacgcaatatccaggatggcgtgcgtctgctcgaagaactgggcgcgatcaccacggatgaacaggccagcgcctataaactgacgccgctcggtcgccagctctcgcagttgcctgtcgacccacgtctggcgcgtatggtgctggaagcgcaaaaacatggctgcgtgcgtgaggcgatgattatcacgtccgcgctctccattcaggatccgcgcgaacgtccgatggacaaacagcaggcatcggacgaaaaacatcgtcgcttccacgacaaagaatccgacttcctcgcgtttgtaaatctgtggaattatcttggcgagcagcaaaaggcgctttcttccaacgccttccgtcgcctgtgtcgtaccgattacctcaactatctgcgcgtgcgcgaatggcaggatatctacacccagttgcgtcaggtggtgaaagaacttggcattccggttaacagcgaaccggcggagtatcgcgaaattcacattgcgttgctgacgggtttactttcccatatcggcatgaaagatgccgataaacaagaatataccggcgcacgtaacgcgcgtttctccatcttccccggttctggtttattcaaaaaaccgccgaaatgggtaatggtggcggaactggtagaaaccagccgcctgtgggggcgcattgctgcgcgtatcgacccggaatgggtggagcctgtcgctcagcatttgattaaacgtacctacagcgaaccgcactgggaacgggcgcagggcgcggtgatggcaacggaaaaagtcactgtttatggtttgccgattgttgccgcgcgcaaggtcaactacagccagatcgatccggcgttatgtcgtgaactctttattcgccatgcgctggtggaaggtgactggcagacgcgtcacgcattcttccgtgaaaacctgaaactgcgggccgaagtggaagagctggaacacaaatcacgtcgccgcgatattctggttgatgacgaaacgttgtttgagttctacgaccagcgcatcagccacgatgtaatctccgctcgtcacttcgatagctggtggaaaaaagtcagccgcgaaacgcctgatttgctcaactttgaaaagagcatgttgatcaaagaaggggcggaaaaaatcagcaagctggattacccgaacttctggcatcagggcaatctcaagctgcgtttgagctatcagtttgagccaggcgcagacgcggacggtgtgaccgtacatattccgctgccgttacttaaccaggttgaggaaagcgggtttgaatggcagatccccggtctgcgccgcgaattggtgattgctctgattaaatcgttgccgaaaccggtacgccgtaattttgtgcctgcaccaaactacgccgaagcgtttttaggccgcgtcacaccgctggagttaccgttgctcgacagccttgagcgcgagttacggcggatgaccggcgttaccgttgaccgcgaagactggcactgggatcaggtgcccgatcacctgaaaatcaccttccgcgtggtggatgacaaaaacaagaagctaaaagaagggcgctcgctacaagatctgaaagatgcgctgaaaggcaaagtgcaggaaacgctgtctgcggtggcggatgacggtatcgagcagagcgggctgcatatctggagttttggtcagctgccggaaagctacgaacagaagcgtggcaactacaaagtgaaggcgtggccagcgctagtggatgaacgcgacagtgtggcgatcaaactgtttgataatccgctagagcaaaaacaggcaatgtggaacggtcttcgccgtctactgctgctgaatattccctcgccgatcaagtatttacatgagaagttaccaaacaaagccaagctggggctgtactttaacccgtatggcaaagtgctggagctgatcgacgactgtatctcctgcggtgtggataaattgatcgacgccaatggtggcccggtctggacggaagaaggctttgctgcgctgcatgaaaaagtgcgtgccgaactgaacgacacggtggtggatattgcgaagcaggtcgagcaaatccttacggcagtgttcaatatcaacaaacgtctgaaagggcgggtggatatgaccatggcgctggggctttctgacattaaagcgcagatgggcgggttggtatatcgcggttttgtcactggtaacggcttcaaacggctgggcgacacgctgcgatatttgcaggcgattgaaaaacgactggaaaaactggcggttgatccacatcgcgaccgtgcgcagatgctgaaagtcgaaaacgtccagcaggcgtggcagcaatggatcaacaaactgccgcctgcacgtcgtgaggatgaagacgtgaaagagatccgttggatgatagaagagctgcgcgttagttacttcgctcaacaacttggtacgccttatccgatttcagataagcgtattttgcaggcgatggagcagattagcggttaaccctgctatttgcctgataaatctaaaacccggtaagcatttagcgccgggttttttattaattctaaaacggtaaggacaaaaattcaggaattcagaaaaatacaattctcagctgcaagatgaataatgtttatctacagcatttccttaaaagatatgtcaggcttgcggagtggcggttaaggaaatacgacttcctcctttcagagtgctccgcttctcactattatctcacgcagtattcttaagggaacgataaggaggaaccatgaacattaccccgtttccgacgctttcgacggcaactatagatgccataaatgttatcggacagtggctggcgcaggatgatttctccggtgaggtgccgtatcaggctgattgcgtcatacttgcaggaaatgcggttatgccgactatcgatgcggcatgtaagattgctcgcgatcagcaaattcctttactgattagtggtggtatcggtcactcgacaacttttttgtatagcgccatcgcacagcatccgcactacaacactatccgcaccactggcagagcagaagcgaccatcctggcggatatcgctcatcagttctggcacattccgcatgaaaaaatctggattgaagaccagtcaacaaactgcggtgaaaacgcacgctttagcatcgcgctattgaatcaggccgtagaacgagttcatacggctatcgttgttcaggaccccaccatgcagcggcgcacgatggcgacgttccgccgtatgactggggacaatcccgatgcaccacgctggttaagttatcccggattcgttcctcagttaggaaataacgcagacagtgtaatctttgttaacccgttgcaaggattatggccagttgagcgttatctctcactactcactggcgagctgccgcgtttacgcgatgatagcgatggctacggtccccgcgggcgagattttatcgttcacgttgattttccggcagaagtcatccatgcatggcaaacgctgaaacatgatgcggtgctcatcgaggcgatggaaagtcgctcgttacgttaaaaattgcccgtttgtgaaccacttgtttgcaaacgggcatgactcctgacttttatttctgccttttattccttttacacttgtttttatgaagcccttcacagaattgtcctttcacgatgccgtctctctgatgattgatgttaattaacaatgcattcaccgaaaacaaacatataaatcacaggagtcgcccatgtcagtacccgttcaacatcctatgtatatcgatggacagtttgttacctggcgtggagacgcatggattgatgtggtaaaccctgctacagaggctgtcatttcccgcatacccgatggtcaggccgaggatgcccgtaaggcaatcgatgcagcagaacgtgcacaaccagaatgggaagcgttgcctgctattgaacgcgccagttggttgcgcaaaatctccgccgggatccgcgaacgcgccagtgaaatcagtgcgctgattgttgaagaagggggcaagatccagcagctggctgaagtcgaagtggcttttactgccgactatatcgattacatggcggagtgggcacggcgttacgagggcgagattattcaaagcgatcgtccaggagaaaatattcttttgtttaaacgtgcgcttggtgtgactaccggcattctgccgtggaacttcccgttcttcctcattgcccgcaaaatggctcccgctcttttgaccggtaataccatcgtcattaaacctagtgaatttacgccaaacaatgcgattgcattcgccaaaatcgtcgatgaaataggccttccgcgcggcgtgtttaaccttgtactggggcgtggtgaaaccgttgggcaagaactggcgggtaacccaaaggtcgcaatggtcagtatgacaggcagcgtctctgcaggtgagaagatcatggcgactgcggcgaaaaacatcaccaaagtgtgtctggaattggggggtaaagcaccagctatcgtaatggacgatgccgatcttgaactggcagtcaaagccatcgttgattcacgcgtcattaatagtgggcaagtgtgtaactgtgcagaacgtatttatgtacagaaaggcatttatgatcagttcgtcaatcggctgggtgaagcgatgcaggcggttcaatttggtaaccccgctgaacgcaacgacattgcgatggggccgttgattaacgccgcggcgctggaaagggttgagcaaaaagtggcgcgcgcagtagaagaaggggcgagagtggcgttgggtggcaaagcggtagaggggaaaggatattattatccgccgacattgctgctggatgttcgccaggaaatgtcgattatgcatgaggaaacctttggcccggttctgccggtggtcgcatttgacacgctggaagaggctatctcaatggctaatgacagtgattacggcctgacctcatcaatctatacccaaaatctgaacgtcgcgatgaaagccattaaagggctgaagtttggtgaaacttacatcaaccgtgaaaacttcgaagctatgcaaggcttccacgccggatggcgtaaatccggtattggcggcgcagatggtaaacatggcctgcatgaatatctgcagacccaggtggtttatttacagtcgtaatgagtaaaagaggcggaggttttttcctccgcctgtgcgcgtcagagtttagcgaatttttcgagggtgcgaataagctgcgtgacgaagccatattcgttatcgtaccaggcgaccgttttcaccagttgtaaatcgcccacggcggtaatttccgtttgcgtggcatcaaacaccgaaccgaaatggctgccaatgatatcggaagagactatttcttcatcggtataaccaaatgactcgttattggtggttgcttgtttaagtgcgttattcacctcttcggcagtcactttttttccgagaatggacaccagctcagtgaccgaacctgttttcaccggcacgcgttgcgcatgacctttcagtttgccgctcagttccgggatcaccagaccaatggct
